(19) United States
(12) Patent Application Publication
(10) Pub. No.: US 2016/0311863 A1
(43) Pub. Date: Oct. 27, 2016

(54) ENGINEERED ALBUMIN BINDING POLYPEPTIDE

(71) Applicant: AFFIBODY AB, Solna (SE)

(72) Inventors: Caroline Ekblad, Saltsjö-Boo (SE); Fredrik Frejd, Stockholm (SE); Joel Lindgren, Stockholm (SE); Amelie Eriksson Karlström, Bromma (SE)

(21) Appl. No.: 15/104,070

(22) PCT Filed: Dec. 19, 2014
(86) PCT No.: PCT/EP2014/078756

§ 371 Date: Jun. 13, 2016

(30) Foreign Application Priority Data
Dec. 20, 2013 (EP) 13198808.1

(51) Int. Cl. C07K 14/315

(52) U.S. Cl. CPC C07K 14/315; A61K 38/00

(57) ABSTRACT

The present disclosure relates to a class of engineered polypeptides having a binding affinity for albumin. In particular, the present invention relates to albumin binding polypeptides which have a high resistance to proteolytic cleavage and therapeutic use thereof. The disclosure provides an albumin binding polypeptide comprising an albumin binding motif, which motif consists of the amino acid sequence

(SEQ ID NO. 1782)
GX_{A}SDX₅YKX₈X₉I X₁₁X₁₂AX₁₄TVEGVX₂₀ ALX₂₃X₂₄X₂₅ILX₂₈X₂₉X_{B}.

### CROSS-REFERENCE TO RELATED APPLICATIONS

[0001] This application is a U.S. National Stage application of PCT/EP2014/078756 filed Dec. 19, 2014 which claims priority to EP Application No. 13198808.1 filed Dec. 20, 2013, both of which are incorporated by reference in their entireties.

### TECHNICAL FIELD

[0002] The present disclosure relates to a class of engineered polypeptides having a binding affinity for albumin. In particular, the present disclosure relates to albumin binding polypeptides which have a high resistance to enzymatic cleavage and the therapeutic use thereof.

### BACKGROUND

### Serum Albumin

[0003] Serum albumin is the most abundant protein in mammalian sera (35-50 g/I, i.e. 0.53-0.75 mM, in humans), and one of its functions is to bind molecules such as lipids and bilirubin (Peters T, Advances in Protein Chemistry 37:161, 1985). The half-life of serum albumin is directly proportional to the size of the animal, where for example human serum albumin (HSA) has a half-life of 19 days and rabbit serum albumin has a half-life of about 5 days (McCurdy T R et al, J Lab Clin Med 143:115, 2004). Human serum albumin is widely distributed throughout the body, in particular in the intestinal and blood compartments, where it is mainly involved in the maintenance of osmolarity. Structurally, albumins are single-chain proteins comprising three homologous domains and totaling 584 or 585 amino acids (Dugaiczyk L et al, Proc Natl Acad Sci USA 79:71, 1982). Albumins contain 17 disulfide bridges and a single reactive thiol, C34, but lack N-linked and O-linked carbohydrate moieties (Peters, 1985, supra; Nicholson J P et al, Br J Anaesth 85:599, 2000). The lack of glycosylation simplifies recombinant expression of albumin. This property of albumin, together with the fact that its three-dimensional structure is known (He X M and Carter D C, Nature 358:209 1992), has made it an attractive candidate for use in recombinant fusion proteins. Such fusion proteins generally combine a therapeutic protein (which would be rapidly cleared from the body upon administration of the protein per se) and a plasma protein (which exhibits a natural slow clearance) in a single polypeptide chain (Sheffield W P, Curr Drug Targets Cardiovacs Haematol Disord 1:1, 2001). Such fusion proteins may provide clinical benefits in requiring less frequent injection and higher levels of therapeutic protein in vivo.

Fusion or Association with HSA Results in Increased In Vivo Half-Life of Proteins

[0004] Serum albumin is devoid of any enzymatic or immunological function and, thus, should not exhibit undesired side effects upon coupling to a bioactive polypeptide. Furthermore, HSA is a natural carrier involved in the endogenous transport and delivery of numerous natural as well as therapeutic molecules (Sellers E M and Koch-Weser M D, “Albumin Structure, Function and Uses”, eds Rosenoer V M et al, Pergamon, Oxford, p 159, 1977). Several strategies have been reported to either covalently couple proteins directly to serum albumins or to a peptide or protein that will allow in vivo association to serum albumins. Examples of the latter approach have been described e.g. in WO91/01743. This document describes inter alia the use of albumin binding peptides or proteins derived from streptococcal protein G for increasing the half-life of other proteins. The idea is to fuse the bacterially derived, albumin binding peptide/protein to a therapeutically interesting peptide/protein, which has been shown to have a rapid clearance in blood. The thus generated fusion protein binds to serum albumin in vivo, and benefits from its longer half-life, which increases the net half-life of the fused therapeutically interesting peptide/protein.

Association with HSA Results in Decreased Immunogenicity

[0005] In addition to the effect on the in vivo half-life of a biologically active protein, it has been proposed that the non-covalent association with albumin of a fusion between a biologically active protein and an albumin binding protein acts to reduce the immune response to the biologically active protein. Thus, in WO2005/097202, there is described the use of this principle to reduce or eliminate the immune response to a biologically active protein.

### Albumin Binding Domains of Bacterial Receptor Proteins

[0006] Streptococcal protein G is a bi-functional receptor present on the surface of certain strains of streptococci and capable of binding to both IgG and serum albumin (Björck et al, Mol Immunol 24:1113, 1987). The structure is highly repetitive with several structurally and functionally different domains (Guss et al, EMBO J 5:1567, 1986), more precisely three Ig-binding motifs and three serum albumin binding domains (Olsson et al, Eur J Biochem 168:319, 1987). The structure of one of the three serum albumin binding domains has been determined, showing a three-helix bundle domain (Kraulis et al, FEBS Lett 378:190, 1996). This motif was named ABD (albumin binding domain) and is 46 amino acid residues in size. In the literature, it has subsequently also been designated G148-GA3.

[0007] Other bacterial albumin binding proteins than protein G from Streptococcus have also been identified, which contain domains similar to the albumin binding three-helix domains of protein G. Examples of such proteins are the PAB, PPL, MAG and ZAG proteins. Studies of structure and function of such albumin binding proteins have been carried out and reported e.g. by Johansson and co-workers (Johansson et al, J Mol Biol 266:859-865, 1997; Johansson et al, J Biol Chem 277:8114-8120, 2002), who introduced the designation “GA module” (protein G-related albumin binding module) for the three-helix protein domain responsible for albumin binding. Furthermore, Rozak et al have reported on the creation of artificial variants of the GA module, which were selected and studied with regard to different species specificity and stability (Rozak et al, Biochemistry 45:3263-3271, 2006; He et al, Protein Science 16:1490-1494, 2007). In the present disclosure, the terminology with regard to GA modules from different bacterial species established in the articles by Johansson et al and by Rozak et al will be followed.

[0008] Recently, variants of the G148-GA3 domain have been developed, with various optimized characteristics. Such variants are for example disclosed in PCT publications WO2009/016043, WO2012/004384 and WO2014/048977.

### Oral Delivery of Protein Therapeutics

[0009] The majority of protein and peptide therapeutics currently on the market are administered by the parenteral route, i.e. without passing the gastrointestinal tract, such as by intravenous, intramuscular or subcutaneous injections. Intravenous administration directly into the systemic circulation provides 100% bioavailability and fast onset of drug action. However, the instant high concentration of the drug in the blood increases the risk of side effects. Furthermore, administration by any injection method is associated with low patient compliance due to the pain and discomfort. Self-administration is often not possible and hence treatment has to be carried out in the clinic. The latter becomes a particular problem if the half-life of the drug is short, and frequent, repeated administrations are required to maintain adequate levels of therapeutic action. Clinical treatment, and in some cases necessary hospitalization of the patient, also implies increased costs for society. Simplified administration is thus a major driving force for development of drugs intended for alternative delivery routes such as oral, intranasal, pulmonary, transdermal or rectal, each of which is associated with specific advantages and limitations. Oral administration remains one of the most convenient administration routes, in particular for the treatment of pediatric patients. Furthermore, oral formulations do not require production under sterile conditions, which reduces the manufacturing costs per unit of drug (Salama et al, Adv Drug Deliv Rev. 58:15-28, 2006). For some protein therapeutics, the oral delivery route may even be more physiological, as has been suggested for insulin (Hoffman and Ziv, Clin Pharmacokinet. 33:285-301, 1997).

[0010] Oral delivery of conventional low molecular weight drugs has been well established in practice. However, oral delivery of larger, less stable and often polar, peptide and protein therapeutics faces other challenges including that the drug must 1) be resistant to the acidic environment of the stomach 2) be resistant to enzymatic degradation in the gastrointestinal tract and 3) be able to cross the intestinal epithelium and reach into the circulation. Different approaches have been attempted to address these challenges either by modifying the protein itself, or by optimizing the formulation or drug carrier system.

### Factors Influencing Oral Bioavailability

[0011] Bioavailability refers to the fraction of an administered dose of an active drug substance that reaches the systemic circulation. By definition, the bioavailability of an intravenously administered drug is 100%. However, when the drug is administered via other routes, for instance by the oral route, the bioavailability decreases due to metabolism and incomplete absorbance.

[0012] The bioavailability of a protein therapeutic administered orally depends on the physiological properties of the protein, such as molecular weight, amino acid sequence, hydrophobicity, isoelectric point (pi), solubility and pH stability, as well as on the biological barriers encountered in the gastrointestinal tract, i.e. the proteolytic environment and the generally poor absorption of large molecules through the intestinal wall.

[0013] The physiochemical environment of the gastrointestinal tract varies depending on the feeding status of the individual. Factors that vary between the fasted and fed stages include pH, the composition of gastrointestinal fluids and the volume of the stomach. In humans, the pH of the stomach is around 1-2 in the fed state whereas it rises to 3-7 in the fasted state. The pH varies throughout the small intestine, but averages around pH 5 and 6.5 in the fed and fasted state, respectively (Klein, AAPS J. 12:397-406, 2010). The differences in pH affect the level of activity of proteolytic enzymes, which are each associated with a specific pH optimum. Pepsin, the predominant protease in the stomach, has optimal activity around pH 2, whereas trypsin and chymotrypsin of the intestine has optimal activity around pH 8. Furthermore, gastric emptying is a rate-limiting step. Food, in particular fatty food, slows gastric emptying and hence the rate of drug absorption (Singh, Clin Pharmacokinet. 37:213-55, 1999), and thus prolongs the time during which the drug is exposed to proteolytic enzymes. Therefore, the bioavailability of the drug can be affected if the drug is taken during or in between meals, with or without a significant of volume liquid, or different types of liquid.

[0014] Poor absorption through the intestinal wall remains the main factor limiting the bioavailability of orally delivered protein therapeutics. Drugs taken orally have, as with any nutrient, two options to cross the intestinal wall; by using either the transcellular pathway, which involves passage across cells, or the paracellular pathway, which involves passage between adjacent cells via tight junctions. Molecules with a molecular weight of less than 500 Da can cross using either pathway (Müller, Curr Issues Mol Biol 13:13-24, 2011). The ability of drugs with a larger molecular weight to cross the intestinal wall depends on the physiochemical properties of the drug, such as charge, lipophilicity and hydrophilicity. For lipophilic drugs, the transcellular route dominates, whereas hydrophilic drugs can cross by the paracellular route (Salama et al, 2006, supra). However, the dimension of the paracellular space is between 10 and 30-50 Å, and it has been suggested that the paracellular transport is generally limited to molecules with a radius less than 15 Å (˜3.5 kDa) (Rubas et al, J Pharm Sci. 85:165-9, 1996). As for the transcellular pathway, substances with a small molecular weight readily cross by passive diffusion. However, substances having a larger molecular weight are confined to active processes requiring energy expenditure, such as pinocytocis (nonspecific “cell drinking”) or transcytosis (receptor-mediated transport).

[0015] Finally, bioavailability is also influenced by interpatient variability, including age (drugs are generally metabolized more slowly in fetal, neonatal and geriatric populations), health of the gastrointestinal tract, and general disease state (e.g. hepatic insufficiency, poor renal function), as well as intrapatient variability, i.e. variability in the same patient over time.

[0016] Increasing the bioavailability of orally administered proteins and peptides is crucial for enabling delivery of a therapeutically effective dose, reducing the manufacturing costs and to a lesser extent reducing the effect of interpatient and intrapatient variability. Strategies to improve the oral bioavailability of protein therapeutics have ranged from changing physiochemical properties such as hydrophobicity, charge, pH stability and solubility; inclusion of protease inhibitors or absorbance enhancers in the drug formulation; and use of formulation vehicles such as emulsions, liposomes, microspheres or nanoparticles (reviewed in Park et al, Reactive and Functional Polymers, 71:280-287, 2011).

### Protein Engineering for Increased In Vivo Stability

[0017] Small robust proteins can potentially be engineered to withstand the rough conditions in the gastrointestinal tract and be small enough to be absorbed into the bloodstream. Naturally occurring, stable proteins such as cyclotides and cysteine knot mini-proteins have been studied and engineered (Craik et al, The Journal of Organic Chemistry, 76:4805, 2011 and Werle et al, Journal of Drug Targeting 14:137, 2006). These naturally occurring proteins are cyclic, which is a feature also shared by the peptide hormones oxytocin and somatostatin.

[0018] Stabilization of peptides and proteins by the introduction of thioether bridges in proteins naturally devoid of an intra-molecular crosslink has been tested (Rink et al, Journal of Pharmacological and Toxicological Methods, 61:210, 2010 and Kluskens et al, The Journal of Pharmacology and Experimental Therapeutics, 328: 849, 2009).

[0019] In summary, considering the relatively low bioavailability of orally administered peptide and protein drugs, it is highly relevant to both reduce the amount that is degraded by gastrointestinal proteases and maintain a long in vivo plasma half-life of the fraction of the drug which crosses the intestinal epithelial membrane in a biologically active form.

[0020] As is evident from the background description above, there is a need for the provision of therapeutically effective biopharmaceuticals which can for example be administered via the oral route.

### DISCLOSURE OF THE INVENTION

[0021] It is an object of the present disclosure to provide new albumin binding molecules, which could be used in therapeutic applications.

[0022] It is another object of the present disclosure to provide a molecule allowing for efficient therapy while alleviating the above mentioned and other drawbacks of current therapies.

[0023] It is furthermore an object of the present disclosure to provide a molecule suitable for oral delivery.

[0024] Another object of the present disclosure is to provide a molecule with a high resistance to proteolytic cleavage.

[0025] These and other objects, which are evident to the skilled person from the present disclosure, are met by different aspects of the invention as claimed in the appended claims and as generally disclosed herein.

[0026] In a first aspect, the disclosure provides an albumin binding polypeptide comprising an albumin binding motif [ABM], which motif consists of the amino acid sequence

(SEQ ID NO. 1782)
GX_{A}SDX₅YKX₈X₉I X₁₁X₁₂AX₁₄TVEGVX₂₀ ALX₂₃X₂₄X₂₅ILX₂₈X₂₉X_{B}

wherein, independently from each other,

[0027] X_{A} is selected from C and K;

[0028] X_{B} is selected from C and K;

and

[0029] X₅ is selected from F and Y;

[0030] X₅ is selected from D, K, N, R and S;

[0031] X₉ is selected from F, I, L, M, V and Y;

[0032] X₁₁ is selected from D, E, N and S;

[0033] X₁₂ is selected from K, N and R;

[0034] X₁₄ is selected from K and R;

[0035] X₂₀ is selected from D, E, H, K, N, Q, R and S;

[0036] X₂₃ is selected from I, K and T;

[0037] X₂₄ is selected from A, D, E, G, H, L, S and T;

[0038] X₂₅ is selected from A, D, E and H;

[0039] X₂₈ is selected from A and K; and

[0040] X₂₉ is selected from A, E and S.

[0041] In one embodiment, X_{A} is C.

[0042] In another embodiment, X_{A} is K.

[0043] In one embodiment, X_{B} is C.

[0044] In another embodiment, X_{B} is K.

[0045] In other words, X_{A}X_{B} is selected from CK, KC, CC and KK, for example selected from CK, KC and CC, such as selected from CK and CC. Thus, in one specific embodiment, X_{A}X_{B} is CK. In another specific embodiment, X_{A}X_{B} is CC. In yet another specific embodiment, X_{A}X_{B} is KC. In another specific embodiment, X_{A}X_{B} is KK.

[0046] In order to provide albumin binding polypeptides which are suitable to therapeutic applications, such as albumin binding polypeptides that are suitable for oral delivery and exhibit high resistant to proteolytic cleavage, such as cleavage by gastrointestinal proteases for example pepsin, trypsin and chymotrypsin, the inventors have studied variants of PEP07830 (SEQ ID NO:1774). For example, the inventors show that a crosslink between residue X_{A}, corresponding to position 2 in the above mentioned sequence, and residue X_{B}, corresponding to position 30 in the above mentioned sequence, leads to an improved protease stability while albumin binding ability is retained, in contrast to other tested crosslinked variants (as described in Examples 4 and 5 below).

[0047] The albumin binding motif, or ABM, corresponds to the albumin binding region of the G148-GA3, which region constitutes two alpha helices within a three-helical bundle protein domain. It is known that the original amino acid residues of said two alpha helices in the parent scaffold constitute a binding surface for interaction with albumin.

[0048] As the skilled person will realize, the function of any polypeptide, such as the albumin binding capacity of the polypeptides according to the present disclosure, is dependent on the tertiary structure of said polypeptide. It is therefore generally possible to make minor changes to the sequence of amino acids in a polypeptide without affecting the function thereof. For example, it is possible that an amino acid residue belonging to a certain functional group of amino acid residues (e.g. hydrophobic, hydrophilic, polar etc) could be exchanged for another amino acid residue from the same functional group.

[0049] Thus, the present disclosure encompasses variants of originally described or naturally occurring albumin binding polypeptides, which are such that the albumin binding characteristics are retained. For example, the present disclosure encompasses modified variants of albumin binding polypeptides previously described in PCT publications WO2009/016043, WO2012/004384 and WO2014/048977; it is contemplated that the modifications described herein make these previously described albumin binders more useful in the various applications referred to in the background section above. A skilled person would appreciate that said modifications are equally applicable to any albumin binding polypeptide based on the G148-GA3 scaffold, as such modifications do not alter the three dimensional conformation required for interaction with albumin.

[0050] Hence, the present disclosure encompasses ABMs comprising substitution mutations that do not significantly diminish albumin binding characteristics, while simultaneously confer improved properties upon said ABM which render it more useful for therapeutic applications, such as treatment via oral administration.

[0051] In one embodiment, X₅ is F.

[0052] In one embodiment, X₅ is Y.

[0053] In one embodiment, X₅ is selected from K, N, R and S.

[0054] In one embodiment, X₅ is selected from N, R and S.

[0055] In one embodiment, X₅ is selected from K, N and R.

[0056] In one embodiment, X₅ is selected from N and R.

[0057] In one embodiment, X₅ is selected from K and R.

[0058] In one embodiment, X₅ is R.

[0059] In one embodiment, X₅ is N.

[0060] In one embodiment, X₈ is K.

[0061] In one embodiment, X₉ is L.

[0062] In one embodiment, X₁₁ is selected from D, E and N.

[0063] In one embodiment, X₁₁ is selected from N and S.

[0064] In one embodiment, X₁₁ is N.

[0065] In one embodiment, X₁₁ is selected from D and E.

[0066] In one embodiment, X₁₁ is D.

[0067] In one embodiment, X₁₁ is E.

[0068] In one embodiment, X₁₂ is selected from K and N.

[0069] In one embodiment, X₁₂ is selected from K and R.

[0070] In one embodiment, X₁₂ is K.

[0071] In one embodiment, X₁₂ is N.

[0072] In one embodiment, X₁₂ is R.

[0073] In one embodiment, X₁₄ is K.

[0074] In one embodiment, X₂₀ is selected from D, E, H, N, Q, R and S.

[0075] In one embodiment, X₂₀ is selected from K and E.

[0076] In one embodiment, X₂₀ is E.

[0077] In one embodiment, X₂₀ is K.

[0078] In one embodiment, X₂₃ is selected from I and K.

[0079] In one embodiment, X₂₃ is I.

[0080] In one embodiment, X₂₃ is K.

[0081] In one embodiment, X₂₄ is selected from A, D, G, H, L, S and T.

[0082] In one embodiment, X₂₄ is selected from A, E, G, H, L, S and T.

[0083] In one embodiment, X₂₄ is selected from A, G, H, L, S and T.

[0084] In one embodiment, X₂₄ is selected from D, E and L.

[0085] In one embodiment, X₂₄ is selected from D and E.

[0086] In one embodiment, X₂₄ is L.

[0087] In one embodiment, X₂₄ is D.

[0088] In one embodiment, X₂₄ is E.

[0089] In one embodiment, X₂₅ is selected from A, E and H.

[0090] In one embodiment, X₂₅ is selected from A and H.

[0091] In one embodiment, X₂₅ is selected from A and E.

[0092] In one embodiment, X₂₅ is selected from D, E and H.

[0093] In one embodiment, X₂₅ is selected from D and E.

[0094] In one embodiment, X₂₅ is E.

[0095] In one embodiment, X₂₅ is A.

[0096] In one embodiment, X₂₅ is D.

[0097] In one embodiment, X₂₅ is H.

[0098] In one embodiment, X₂₈ is A.

[0099] In one embodiment, X₂₉ is selected from A and S.

[0100] In one embodiment, X₂₉ is A.

[0101] In one embodiment, X₂₉ is S.

[0102] In one embodiment, the ABM comprises an additional position X₃₁ located on the C-terminal side of the core sequence disclosed above. In one embodiment, the amino acid residue at position X₃₁ is P.

[0103] As stated above, the substitution mutations designated X_{A} and X_{B} may be introduced into the sequences of albumin binding polypeptides previously described in PCT publications WO2009/016043, WO2012/004384 and WO2014/048977. Taking the disclosure in these PCT applications of individual albumin binding motifs into account, and considering the experimental proof of correct functioning given in the experimental section to follow, the skilled person is in a position to visualize a substantial number of individual albumin binding motif (ABM) sequences. These sequences comprise the “crosslinking mutations” in positions X_{A} and X_{B} and constitute individual embodiments of the ABM sequence in the definition of albumin binding polypeptides according to this aspect of the present disclosure. The sequences of individual albumin binding polypeptides, from which individual albumin binding motifs may be deduced, are presented in FIG. 1 and denoted SEQ ID NO:1-1768.

[0104] Thus, in one embodiment of the albumin binding polypeptide according to the invention, the ABM consists of an amino acid sequence extending from position 16 to position 45 in an amino acid sequence selected from the group consisting of SEQ ID NO:1-1768.

[0105] In one embodiment, X_{A} is C and X_{B} is C or K, so the ABM consists of an amino acid sequence extending from position 16 to position 45 in an amino acid sequence selected from the group consisting of SEQ ID NO:1, 3, 5, 7, 9, 11, 13, 15, 17, 19, 21, 23, 25, 27, 29, 31, 33, 35, 37, 39, 41, 43, 45, 47, 49, 51, 53, 55, 57, 59, 61, 63, 65, 67, 69, 71, 73, 75, 77, 79, 81, 83, 85, 87, 89, 91, 93, 95, 97, 99, 101, 103, 105, 107, 109, 111, 113, 115, 117, 119, 121, 123, 125, 127, 129, 131, 133, 135, 137, 139, 141, 143, 145, 147, 149, 151, 153, 155, 157, 159, 161, 163, 165, 167, 169, 171, 173, 175, 177, 179, 181, 183, 185, 187, 189, 191, 193, 195, 197, 199, 201, 203, 205, 207, 209, 211, 213, 215, 217, 219, 221, 223, 225, 227, 229, 231, 233, 235, 237, 239, 241, 243, 245, 247, 249, 251, 253, 255, 257, 259, 261, 263, 265, 267, 269, 271, 273, 275, 277, 279, 281, 283, 285, 287, 289, 291, 293, 295, 297, 299, 301, 303, 305, 307, 309, 311, 313, 315, 317, 319, 321, 323, 325, 327, 329, 331, 333, 335, 337, 339, 341, 343, 345, 347, 349, 351, 353, 355, 357, 359, 361, 363, 365, 367, 369, 371, 373, 375, 377, 379, 381, 383, 385, 387, 389, 391, 393, 395, 397, 399, 401, 403, 405, 407, 409, 411, 413, 415, 417, 419, 421, 423, 425, 427, 429, 431, 433, 435, 437, 439, 441, 443, 445, 447, 449, 451, 453, 455, 457, 459, 461, 463, 465, 467, 469, 471, 473, 475, 477, 479, 481, 483, 485, 487, 489, 491, 493, 495, 497, 499, 501, 503, 505, 507, 509, 511, 513, 515, 517, 519, 521, 523, 525, 527, 529, 531, 533, 535, 537, 539, 541, 543, 545, 547, 549, 551, 553, 555, 557, 559, 561, 563, 565, 567, 569, 571, 573, 575, 577, 579, 581, 583, 585, 587, 589, 591, 593, 595, 597, 599, 601, 603, 605, 607, 609, 611, 613, 615, 617, 619, 621, 623, 625, 627, 629, 631, 633, 635, 637, 639, 641, 643, 645, 647, 649, 651, 653, 655, 657, 659, 661, 663, 665, 667, 669, 671, 673, 675, 677, 679, 681, 683, 685, 687, 689, 691, 693, 695, 697, 699, 701, 703, 705, 707, 709, 711, 713, 715, 717, 719, 721, 723, 725, 727, 729, 731, 733, 735, 737, 739, 741, 743, 745, 747, 749, 751, 753, 755, 757, 759, 761, 763, 765, 767, 769, 771, 773, 775, 777, 779, 781, 783, 785, 787, 789, 791, 793, 795, 797, 799, 801, 803, 805, 807, 809, 811, 813, 815, 817, 819, 821, 823, 825, 827, 829, 831, 833, 835, 837, 839, 841, 843, 845, 847, 849, 851, 853, 855, 857, 859, 861, 863, 865, 867, 869, 871, 873, 875, 877, 879, 881, 883, 885, 887, 889, 891, 893, 895, 897, 899, 901, 903, 905, 907, 909, 911, 913, 915, 917, 919, 921, 923, 925, 927, 929, 931, 933, 935, 937, 939, 941, 943, 945, 947, 949, 951, 953, 955, 957, 959, 961, 963, 965, 967, 969, 971, 973, 975, 977, 979, 981, 983, 985, 987, 989, 991, 993, 995, 997, 999, 1001, 1003, 1005, 1007, 1009, 1011, 1013, 1015, 1017, 1019, 1021, 1023, 1025, 1027, 1029, 1031, 1033, 1035, 1037, 1039, 1041, 1043, 1045, 1047, 1049, 1051, 1053, 1055, 1057, 1059, 1061, 1063, 1065, 1067, 1069, 1071, 1073, 1075, 1077, 1079, 1081, 1083, 1085, 1087, 1089, 1091, 1093, 1095, 1097, 1099, 1101, 1103, 1105, 1107, 1109, 1111, 1113, 1115, 1117, 1119, 1121, 1123, 1125, 1127, 1129, 1131, 1133, 1135, 1137, 1139, 1141, 1143, 1145, 1147, 1149, 1151, 1153, 1155, 1157, 1159, 1161, 1163, 1165, 1167, 1169, 1171, 1173, 1175, 1177, 1179, 1181, 1183, 1185, 1187, 1189, 1191, 1193, 1195, 1197, 1199, 1201, 1203, 1205, 1207, 1209, 1211, 1213, 1215, 1217, 1219, 1221, 1223, 1225, 1227, 1229, 1231, 1233, 1235, 1237, 1239, 1241, 1243, 1245, 1247, 1249, 1251, 1253, 1255, 1257, 1259, 1261, 1263, 1265, 1267, 1269, 1271, 1273, 1275, 1277, 1279, 1281, 1283, 1285, 1287, 1289, 1291, 1293, 1295, 1297, 1299, 1301, 1303, 1305, 1307, 1309, 1311, 1313, 1315, 1317, 1319, 1321, 1323, 1325, 1327, 1329, 1331, 1333, 1335, 1337, 1339, 1341, 1343, 1345, 1347, 1349, 1351, 1353, 1355, 1357, 1359, 1361, 1363, 1365, 1367, 1369, 1371, 1373, 1375, 1377, 1379, 1381, 1383, 1385, 1387, 1389, 1391, 1393, 1395, 1397, 1399, 1401, 1403, 1405, 1407, 1409, 1411, 1413, 1415, 1417, 1419, 1421, 1423, 1425, 1427, 1429, 1431, 1433, 1435, 1437, 1439, 1441, 1443, 1445, 1447, 1449, 1451, 1453, 1455, 1457, 1459, 1461, 1463, 1465, 1467, 1469, 1471, 1473, 1475, 1477, 1479, 1481, 1483, 1485, 1487, 1489, 1491, 1493, 1495, 1497, 1499, 1501, 1503, 1505, 1507, 1509, 1511, 1513, 1515, 1517, 1519, 1521, 1523, 1525, 1527, 1529, 1531, 1533, 1535, 1537, 1539, 1541, 1543, 1545, 1547, 1549, 1551, 1553, 1555, 1557, 1559, 1561, 1563, 1565, 1567, 1569, 1571, 1573, 1575, 1577, 1579, 1581, 1583, 1585, 1587, 1589, 1591, 1593, 1595, 1597, 1599, 1601, 1603, 1605, 1607, 1609, 1611, 1613, 1615, 1617, 1619, 1621, 1623, 1625, 1627, 1629, 1631, 1633, 1635, 1637, 1639, 1641, 1643, 1645, 1647, 1649, 1651, 1653, 1655, 1657, 1659, 1661, 1663, 1665, 1667, 1669, 1671, 1673, 1675, 1677, 1679, 1681, 1683, 1685, 1687, 1689, 1691, 1693, 1695, 1697, 1699, 1701, 1703, 1705, 1707, 1709, 1711, 1713, 1715, 1717, 1719, 1721, 1723, 1725, 1727, 1729, 1731, 1733, 1735, 1737, 1739, 1741, 1743, 1745, 1747, 1749, 1751, 1753, 1755, 1757, 1759, 1761, 1763, 1765 and 1767.

[0106] In another embodiment, X_{A} is C and X_{B} is K, so the ABM consists of an amino acid sequence extending from position 16 to position 45 in an amino acid sequence selected from the group consisting of SEQ ID NO:1, 5, 9, 13, 17, 21, 25, 29, 33, 37, 41, 45, 49, 53, 57, 61, 65, 69, 73, 77, 81, 85, 89, 93, 97, 101, 105, 109, 113, 117, 121, 125, 129, 133, 137, 141, 145, 149, 153, 157, 161, 165, 169, 173, 177, 181, 185, 189, 193, 197, 201, 205, 209, 213, 217, 221, 225, 229, 233, 237, 241, 245, 249, 253, 257, 261, 265, 269, 273, 277, 281, 285, 289, 293, 297, 301, 305, 309, 313, 317, 321, 325, 329, 333, 337, 341, 345, 349, 353, 357, 361, 365, 369, 373, 377, 381, 385, 389, 393, 397, 401, 405, 409, 413, 417, 421, 425, 429, 433, 437, 441, 445, 449, 453, 457, 461, 465, 469, 473, 477, 481, 485, 489, 493, 497, 501, 505, 509, 513, 517, 521, 525, 529, 533, 537, 541, 545, 549, 553, 557, 561, 565, 569, 573, 577, 581, 585, 589, 593, 597, 601, 605, 609, 613, 617, 621, 625, 629, 633, 637, 641, 645, 649, 653, 657, 661, 665, 669, 673, 677, 681, 685, 689, 693, 697, 701, 705, 709, 713, 717, 721, 725, 729, 733, 737, 741, 745, 749, 753, 757, 761, 765, 769, 773, 777, 781, 785, 789, 793, 797, 801, 805, 809, 813, 817, 821, 825, 829, 833, 837, 841, 845, 849, 853, 857, 861, 865, 869, 873, 877, 881, 885, 889, 893, 897, 901, 905, 909, 913, 917, 921, 925, 929, 933, 937, 941, 945, 949, 953, 957, 961, 965, 969, 973, 977, 981, 985, 989, 993, 997, 1001, 1005, 1009, 1013, 1017, 1021, 1025, 1029, 1033, 1037, 1041, 1045, 1049, 1053, 1057, 1061, 1065, 1069, 1073, 1077, 1081, 1085, 1089, 1093, 1097, 1101, 1105, 1109, 1113, 1117, 1121, 1125, 1129, 1133, 1137, 1141, 1145, 1149, 1153, 1157, 1161, 1165, 1169, 1173, 1177, 1181, 1185, 1189, 1193, 1197, 1201, 1205, 1209, 1213, 1217, 1221, 1225, 1229, 1233, 1237, 1241, 1245, 1249, 1253, 1257, 1261, 1265, 1269, 1273, 1277, 1281, 1285, 1289, 1293, 1297, 1301, 1305, 1309, 1313, 1317, 1321, 1325, 1329, 1333, 1337, 1341, 1345, 1349, 1353, 1357, 1361, 1365, 1369, 1373, 1377, 1381, 1385, 1389, 1393, 1397, 1401, 1405, 1409, 1413, 1417, 1421, 1425, 1429, 1433, 1437, 1441, 1445, 1449, 1453, 1457, 1461, 1465, 1469, 1473, 1477, 1481, 1485, 1489, 1493, 1497, 1501, 1505, 1509, 1513, 1517, 1521, 1525, 1529, 1533, 1537, 1541, 1545, 1549, 1553, 1557, 1561, 1565, 1569, 1573, 1577, 1581, 1585, 1589, 1593, 1597, 1601, 1605, 1609, 1613, 1617, 1621, 1625, 1629, 1633, 1637, 1641, 1645, 1649, 1653, 1657, 1661, 1665, 1669, 1673, 1677, 1681, 1685, 1689, 1693, 1697, 1701, 1705, 1709, 1713, 1717, 1721, 1725, 1729, 1733, 1737, 1741, 1745, 1749, 1753, 1757, 1761 and 1765.

[0107] In another embodiment, the ABM sequence is one of the sequences listed in PCT publication WO2009/016043, mutated as described herein through substitution in the X_{A} and X_{B} positions. Thus, in this embodiment, the ABM consists of an amino acid sequence extending from position 16 to position 45 in an amino acid sequence selected from the group consisting of SEQ ID NO:5-1004.

[0108] In another embodiment, X_{A} is C and X_{B} is C or K in these sequences from WO2009/016043, so the ABM consists of an amino acid sequence extending from position 16 to position 45 in an amino acid sequence selected from the group consisting of SEQ ID NO:5, 7, 9, 11, 13, 15, 17, 19, 21, 23, 25, 27, 29, 31, 33, 35, 37, 39, 41, 43, 45, 47, 49, 51, 53, 55, 57, 59, 61, 63, 65, 67, 69, 71, 73, 75, 77, 79, 81, 83, 85, 87, 89, 91, 93, 95, 97, 99, 101, 103, 105, 107, 109, 111, 113, 115, 117, 119, 121, 123, 125, 127, 129, 131, 133, 135, 137, 139, 141, 143, 145, 147, 149, 151, 153, 155, 157, 159, 161, 163, 165, 167, 169, 171, 173, 175, 177, 179, 181, 183, 185, 187, 189, 191, 193, 195, 197, 199, 201, 203, 205, 207, 209, 211, 213, 215, 217, 219, 221, 223, 225, 227, 229, 231, 233, 235, 237, 239, 241, 243, 245, 247, 249, 251, 253, 255, 257, 259, 261, 263, 265, 267, 269, 271, 273, 275, 277, 279, 281, 283, 285, 287, 289, 291, 293, 295, 297, 299, 301, 303, 305, 307, 309, 311, 313, 315, 317, 319, 321, 323, 325, 327, 329, 331, 333, 335, 337, 339, 341, 343, 345, 347, 349, 351, 353, 355, 357, 359, 361, 363, 365, 367, 369, 371, 373, 375, 377, 379, 381, 383, 385, 387, 389, 391, 393, 395, 397, 399, 401, 403, 405, 407, 409, 411, 413, 415, 417, 419, 421, 423, 425, 427, 429, 431, 433, 435, 437, 439, 441, 443, 445, 447, 449, 451, 453, 455, 457, 459, 461, 463, 465, 467, 469, 471, 473, 475, 477, 479, 481, 483, 485, 487, 489, 491, 493, 495, 497, 499, 501, 503, 505, 507, 509, 511, 513, 515, 517, 519, 521, 523, 525, 527, 529, 531, 533, 535, 537, 539, 541, 543, 545, 547, 549, 551, 553, 555, 557, 559, 561, 563, 565, 567, 569, 571, 573, 575, 577, 579, 581, 583, 585, 587, 589, 591, 593, 595, 597, 599, 601, 603, 605, 607, 609, 611, 613, 615, 617, 619, 621, 623, 625, 627, 629, 631, 633, 635, 637, 639, 641, 643, 645, 647, 649, 651, 653, 655, 657, 659, 661, 663, 665, 667, 669, 671, 673, 675, 677, 679, 681, 683, 685, 687, 689, 691, 693, 695, 697, 699, 701, 703, 705, 707, 709, 711, 713, 715, 717, 719, 721, 723, 725, 727, 729, 731, 733, 735, 737, 739, 741, 743, 745, 747, 749, 751, 753, 755, 757, 759, 761, 763, 765, 767, 769, 771, 773, 775, 777, 779, 781, 783, 785, 787, 789, 791, 793, 795, 797, 799, 801, 803, 805, 807, 809, 811, 813, 815, 817, 819, 821, 823, 825, 827, 829, 831, 833, 835, 837, 839, 841, 843, 845, 847, 849, 851, 853, 855, 857, 859, 861, 863, 865, 867, 869, 871, 873, 875, 877, 879, 881, 883, 885, 887, 889, 891, 893, 895, 897, 899, 901, 903, 905, 907, 909, 911, 913, 915, 917, 919, 921, 923, 925, 927, 929, 931, 933, 935, 937, 939, 941, 943, 945, 947, 949, 951, 953, 955, 957, 959, 961, 963, 965, 967, 969, 971, 973, 975, 977, 979, 981, 983, 985, 987, 989, 991, 993, 995, 997, 999, 1001 and 1003.

[0109] In another embodiment, X_{A} is C and X_{B} is K in these sequences from WO2009/016043, so the ABM consists of an amino acid sequence extending from position 16 to position 45 in an amino acid sequence selected from the group consisting of SEQ ID NO:5, 9, 13, 17, 21, 25, 29, 33, 37, 41, 45, 49, 53, 57, 61, 65, 69, 73, 77, 81, 85, 89, 93, 97, 101, 105, 109, 113, 117, 121, 125, 129, 133, 137, 141, 145, 149, 153, 157, 161, 165, 169, 173, 177, 181, 185, 189, 193, 197, 201, 205, 209, 213, 217, 221, 225, 229, 233, 237, 241, 245, 249, 253, 257, 261, 265, 269, 273, 277, 281, 285, 289, 293, 297, 301, 305, 309, 313, 317, 321, 325, 329, 333, 337, 341, 345, 349, 353, 357, 361, 365, 369, 373, 377, 381, 385, 389, 393, 397, 401, 405, 409, 413, 417, 421, 425, 429, 433, 437, 441, 445, 449, 453, 457, 461, 465, 469, 473, 477, 481, 485, 489, 493, 497, 501, 505, 509, 513, 517, 521, 525, 529, 533, 537, 541, 545, 549, 553, 557, 561, 565, 569, 573, 577, 581, 585, 589, 593, 597, 601, 605, 609, 613, 617, 621, 625, 629, 633, 637, 641, 645, 649, 653, 657, 661, 665, 669, 673, 677, 681, 685, 689, 693, 697, 701, 705, 709, 713, 717, 721, 725, 729, 733, 737, 741, 745, 749, 753, 757, 761, 765, 769, 773, 777, 781, 785, 789, 793, 797, 801, 805, 809, 813, 817, 821, 825, 829, 833, 837, 841, 845, 849, 853, 857, 861, 865, 869, 873, 877, 881, 885, 889, 893, 897, 901, 905, 909, 913, 917, 921, 925, 929, 933, 937, 941, 945, 949, 953, 957, 961, 965, 969, 973, 977, 981, 985, 989, 993, 997 and 1001.

[0110] In another embodiment, the ABM sequence is a mutated version of any one of the albumin binding motif sequences disclosed in claim 24 of WO2009/016043. Thus, in this embodiment, the ABM consists of an amino acid sequence extending from position 16 to position 45 in an amino acid sequence selected from the group consisting of SEQ ID NO:9-12, 13-16, 37-40, 61-64, 101-104, 109-112, 185-188, 197-200, 213-216, 217-220, 221-224, 617-620, 925-928, 929-932, 933-936, 937-940, 941-944, 945-948 and 949-952.

[0111] In another embodiment, X_{A} is C and X_{B} is C or K in these sequences from claim 24 of WO2009/016043, so the ABM consists of an amino acid sequence extending from position 16 to position 45 in an amino acid sequence selected from the group consisting of SEQ ID NO: 9, 11, 13, 15, 37, 39, 61, 63, 101, 103, 109, 111, 185, 187, 197, 199, 213, 215, 217, 219, 221, 223, 617, 619, 925, 927, 929, 931, 933, 935, 937, 939, 941, 943, 945, 947, 949 and 951.

[0112] In another embodiment, X_{A} is C and X_{B} is K in these sequences from claim 24 of WO2009/016043, so the ABM consists of an amino acid sequence extending from position 16 to position 45 in an amino acid sequence selected from the group consisting of SEQ ID NO:9, 13, 37, 61, 101, 109, 185, 197, 213, 217, 221, 617, 925, 929, 933, 937, 941, 945 and 949.

[0113] In another embodiment, the ABM sequence is a mutated version of any one of the albumin binding motif sequences disclosed in claim 25 of WO2009/016043. Thus, in this embodiment, the ABM consists of an amino acid sequence extending from position 16 to position 45 in an amino acid sequence selected from the group consisting of SEQ ID NO:9-12, 213-216 and 925-928.

[0114] In another embodiment, X_{A} is C and X_{B} is C or K in these sequences from claim 25 of WO2009/016043, so the ABM consists of an amino acid sequence extending from position 16 to position 45 in an amino acid sequence selected from the group consisting of SEQ ID NO:9, 11, 213, 215, 925 and 927.

[0115] In another embodiment, X_{A} is C and X_{B} is K in these sequences from claim 25 of WO2009/016043, so the ABM consists of an amino acid sequence extending from position 16 to position 45 in an amino acid sequence selected from the group consisting of SEQ ID NO:9, 213 and 925, such as SEQ ID NO:925.

[0116] In another embodiment, the ABM sequence is one of the sequences listed in PCT publication WO2012/004384, mutated as described herein through substitution in the X_{A} and X_{B} positions. Thus, in this embodiment, the ABM consists of an amino acid sequence extending from position 16 to position 45 in an amino acid sequence selected from the group consisting of SEQ ID NO:1-4 and 1005-1736. In another embodiment, the ABM sequence consists of an amino acid sequence extending from position 16 to position 45 in an amino acid sequence selected from SEQ ID NO:1-4.

[0117] In another embodiment, X_{A} is C and X_{B} is C or K in these sequences from WO2012/004384, so the ABM consists of an amino acid sequence extending from position 16 to position 45 in an amino acid sequence selected from the group consisting of SEQ ID NO:1, 3, 1005, 1007, 1009, 1011, 1013, 1015, 1017, 1019, 1021, 1023, 1025, 1027, 1029, 1031, 1033, 1035, 1037, 1039, 1041, 1043, 1045, 1047, 1049, 1051, 1053, 1055, 1057, 1059, 1061, 1063, 1065, 1067, 1069, 1071, 1073, 1075, 1077, 1079, 1081, 1083, 1085, 1087, 1089, 1091, 1093, 1095, 1097, 1099, 1101, 1103, 1105, 1107, 1109, 1111, 1113, 1115, 1117, 1119, 1121, 1123, 1125, 1127, 1129, 1131, 1133, 1135, 1137, 1139, 1141, 1143, 1145, 1147, 1149, 1151, 1153, 1155, 1157, 1159, 1161, 1163, 1165, 1167, 1169, 1171, 1173, 1175, 1177, 1179, 1181, 1183, 1185, 1187, 1189, 1191, 1193, 1195, 1197, 1199, 1201, 1203, 1205, 1207, 1209, 1211, 1213, 1215, 1217, 1219, 1221, 1223, 1225, 1227, 1229, 1231, 1233, 1235, 1237, 1239, 1241, 1243, 1245, 1247, 1249, 1251, 1253, 1255, 1257, 1259, 1261, 1263, 1265, 1267, 1269, 1271, 1273, 1275, 1277, 1279, 1281, 1283, 1285, 1287, 1289, 1291, 1293, 1295, 1297, 1299, 1301, 1303, 1305, 1307, 1309, 1311, 1313, 1315, 1317, 1319, 1321, 1323, 1325, 1327, 1329, 1331, 1333, 1335, 1337, 1339, 1341, 1343, 1345, 1347, 1349, 1351, 1353, 1355, 1357, 1359, 1361, 1363, 1365, 1367, 1369, 1371, 1373, 1375, 1377, 1379, 1381, 1383, 1385, 1387, 1389, 1391, 1393, 1395, 1397, 1399, 1401, 1403, 1405, 1407, 1409, 1411, 1413, 1415, 1417, 1419, 1421, 1423, 1425, 1427, 1429, 1431, 1433, 1435, 1437, 1439, 1441, 1443, 1445, 1447, 1449, 1451, 1453, 1455, 1457, 1459, 1461, 1463, 1465, 1467, 1469, 1471, 1473, 1475, 1477, 1479, 1481, 1483, 1485, 1487, 1489, 1491, 1493, 1495, 1497, 1499, 1501, 1503, 1505, 1507, 1509, 1511, 1513, 1515, 1517, 1519, 1521, 1523, 1525, 1527, 1529, 1531, 1533, 1535, 1537, 1539, 1541, 1543, 1545, 1547, 1549, 1551, 1553, 1555, 1557, 1559, 1561, 1563, 1565, 1567, 1569, 1571, 1573, 1575, 1577, 1579, 1581, 1583, 1585, 1587, 1589, 1591, 1593, 1595, 1597, 1599, 1601, 1603, 1605, 1607, 1609, 1611, 1613, 1615, 1617, 1619, 1621, 1623, 1625, 1627, 1629, 1631, 1633, 1635, 1637, 1639, 1641, 1643, 1645, 1647, 1649, 1651, 1653, 1655, 1657, 1659, 1661, 1663, 1665, 1667, 1669, 1671, 1673, 1675, 1677, 1679, 1681, 1683, 1685, 1687, 1689, 1691, 1693, 1695, 1697, 1699, 1701, 1703, 1705, 1707, 1709, 1711, 1713, 1715, 1717, 1719, 1721, 1723, 1725, 1727, 1729, 1731, 1733 and 1735.

[0118] In another embodiment, X_{A} is C and X_{B} is K in these sequences from WO2012/004384, so the ABM consists of an amino acid sequence extending from position 16 to position 45 in an amino acid sequence selected from the group consisting of SEQ ID NO:1, 1005, 1009, 1013, 1017, 1021, 1025, 1029, 1033, 1037, 1041, 1045, 1049, 1053, 1057, 1061, 1065, 1069, 1073, 1077, 1081, 1085, 1089, 1093, 1097, 1101, 1105, 1109, 1113, 1117, 1121, 1125, 1129, 1133, 1137, 1141, 1145, 1149, 1153, 1157, 1161, 1165, 1169, 1173, 1177, 1181, 1185, 1189, 1193, 1197, 1201, 1205, 1209, 1213, 1217, 1221, 1225, 1229, 1233, 1237, 1241, 1245, 1249, 1253, 1257, 1261, 1265, 1269, 1273, 1277, 1281, 1285, 1289, 1293, 1297, 1301, 1305, 1309, 1313, 1317, 1321, 1325, 1329, 1333, 1337, 1341, 1345, 1349, 1353, 1357, 1361, 1365, 1369, 1373, 1377, 1381, 1385, 1389, 1393, 1397, 1401, 1405, 1409, 1413, 1417, 1421, 1425, 1429, 1433, 1437, 1441, 1445, 1449, 1453, 1457, 1461, 1465, 1469, 1473, 1477, 1481, 1485, 1489, 1493, 1497, 1501, 1505, 1509, 1513, 1517, 1521, 1525, 1529, 1533, 1537, 1541, 1545, 1549, 1553, 1557, 1561, 1565, 1569, 1573, 1577, 1581, 1585, 1589, 1593, 1597, 1601, 1605, 1609, 1613, 1617, 1621, 1625, 1629, 1633, 1637, 1641, 1645, 1649, 1653, 1657, 1661, 1665, 1669, 1673, 1677, 1681, 1685, 1689, 1693, 1697, 1701, 1705, 1709, 1713, 1717, 1721, 1725, 1729 and 1733.

[0119] In another embodiment, the ABM sequence is a mutated version of the albumin binding motif in any one of the amino acid sequences disclosed in claim 23 of WO2012/004384. Thus, in this embodiment, the ABM consists of an amino acid sequence extending from position 16 to position 45 in an amino acid sequence selected from the group consisting of SEQ ID NO:1-4, 1017-1020, 1021-1024, 1029-1032, 1033-1036, 1041-1044, 1045-1048, 1053-1056, 1061-1064, 1065-1068, 1073-1076, 1077-1080, 1085-1088, 1089-1092, 1097-1100, 1101-1104, 1109-1112, 1113-1116, 1121-1124, 1125-1128, 1133-1136, 1137-1140, 1145-1148, 1149-1152, 1161-1164, 1165-1168, 1193-1196, 1197-1200, 1577-1580, 1581-1584, 1585-1588, 1589-1592, 1593-1596, 1597-1600, 1601-1604, 1689-1692, 1693-1696, 1697-1700, 1701-1704, 1705-1708, 1709-1712, 1713-1716, 1717-1720, 1721-1724, 1725-1728, 1729-1732 and 1733-1736.

[0120] In another embodiment, X_{A} is C and X_{B} is C or K in these sequences from claim 23 of WO2012/004384, so the ABM consists of an amino acid sequence extending from position 16 to position 45 in an amino acid sequence selected from the group consisting of SEQ ID NO:1, 3, 1017, 1019, 1021, 1023, 1029, 1031, 1033, 1035, 1041, 1043, 1045, 1047, 1053, 1055, 1061, 1063, 1065, 1067, 1073, 1075, 1077, 1079, 1085, 1087, 1089, 1091, 1097, 1099, 1101, 1103, 1109, 1111, 1113, 1115, 1121, 1123, 1125, 1127, 1133, 1135, 1137, 1139, 1145, 1147, 1149, 1151, 1161, 1163, 1165, 1167, 1193, 1195, 1197, 1199, 1577, 1579, 1581, 1583, 1585, 1587, 1589, 1591, 1593, 1595, 1597, 1599, 1601, 1603, 1689, 1691, 1693, 1695, 1697, 1699, 1701, 1703, 1705, 1707, 1709, 1711, 1713, 1715, 1717, 1719, 1721, 1723, 1725, 1727, 1729, 1731, 1733 and 1735.

[0121] In another embodiment, X_{A} is C and X_{B} is K in these sequences from claim 23 of WO2012/004384, so the ABM consists of an amino acid sequence extending from position 16 to position 45 in an amino acid sequence selected from the group consisting of SEQ ID NO:1, 1017, 1021, 1029, 1033, 1041, 1045, 1053, 1061, 1065, 1073, 1077, 1085, 1089, 1097, 1101, 1109, 1113, 1121, 1125, 1133, 1137, 1145, 1149, 1161, 1165, 1193, 1197, 1577, 1581, 1585, 1589, 1593, 1597, 1601, 1689, 1693, 1697, 1701, 1705, 1709, 1713, 1717, 1721, 1725, 1729 and 1733.

[0122] In another embodiment, the ABM sequence is one of the sequences listed in PCT publication WO2014/048977, mutated as described herein through substitution in the X_{A} and X_{B} positions. Thus, in this embodiment, the ABM consists of an amino acid sequence extending from position 16 to position 45 in an amino acid sequence selected from the group consisting of SEQ ID NO:1737-1768.

[0123] In another embodiment, X_{A} is C and X_{B} is C or K in these sequences from PCT publication WO2014/048977, so the ABM consists of an amino acid sequence extending from position 16 to position 45 in an amino acid sequence selected from the group consisting of SEQ ID NO: 1737, 1739, 1741, 1743, 1745, 1747, 1749, 1751, 1753, 1755, 1757, 1759, 1761, 1763, 1765 and 1767.

[0124] In another embodiment, X_{A} is C and X_{B} is K in these sequences from PCT publication WO2014/048977, so the ABM consists of an amino acid sequence extending from position 16 to position 45 in an amino acid sequence selected from the group consisting of SEQ ID NO: 1737, 1741, 1745, 1749, 1753, 1757, 1761 and 1765.

[0125] In another embodiment, the ABM sequence is a mutated version of the albumin binding motif sequence disclosed in claim 2 of PCT publication WO2014/048977. Thus, in this embodiment, the ABM consists of an amino acid sequence extending from position 16 to position 45 in an amino acid sequence selected from the group consisting of SEQ ID NO:1737-1740.

[0126] In another embodiment, X_{A} is C and X_{B} is C or K in this sequence from claim 2 of PCT publication WO2014/048977, so the ABM consists of an amino acid sequence extending from position 16 to position 45 in an amino acid sequence selected from the group consisting of SEQ ID NO: 1737 and 1739.

[0127] In another embodiment, X_{A} is C and X_{B} is K in this sequence from claim 2 of PCT publication WO2014/048977, so the ABM consists of an amino acid sequence extending from position 16 to position 45 in SEQ ID NO:1737.

[0128] In embodiments of the present disclosure, the ABM forms part of a three-helix bundle protein domain. For example, the ABM may essentially constitute, or form part of, two alpha helices with an interconnecting loop, within said three-helix bundle protein domain.

[0129] In particular embodiments, the three-helix bundle protein domain is selected from the group consisting of three-helix domains of bacterial receptor proteins. Non-limiting examples of such bacterial receptor proteins are selected from the group consisting of albumin binding receptor proteins from species of Streptococcus, Peptostreptococcus and Finegoldia, such as for example selected from the group consisting of proteins G, MAG, ZAG, PPL and PAB. In a specific embodiment, the ABM forms part of protein G, such as for example protein G from Streptococcus strain G148. In different variants of this embodiment, the three-helix bundle protein domain of which the ABM forms a part is selected from the group consisting of domain GA1, domain GA2 and domain GA3 of protein G from Streptococcus strain G148, in particular domain GA3.

[0130] In alternative embodiments, the ABM forms part of one or more of the five three-helix domains of the bacterial receptor protein A from Staphylococcus aureus; i.e. the three-helix bundle protein domain is selected from the group consisting of protein A domains A, B, C, D and E. In other similar embodiments, the ABM forms part of protein Z, derived from domain B of protein A from Staphylococcus aureus.

[0131] In embodiments of the present aspect wherein the ABM “forms part of” a three-helix bundle protein domain, this is understood to mean that the sequence of the ABM is “inserted” into or “grafted” onto the sequence of the naturally occurring (or otherwise original) three-helix bundle domain, such that the ABM replaces a similar structural motif in the original domain. For example, without wishing to be bound by theory, the ABM is thought to constitute two of the three helices of a three-helix bundle, and can therefore replace such a two-helix motif within any three-helix bundle. As the skilled person will realize, the replacement of two helices of the three-helix bundle domain by the two ABM helices has to be performed so as not to affect the basic structure of the polypeptide. That is, the overall folding of the Ca-backbone of the polypeptide according to this embodiment will be substantially the same as that of the three-helix bundle protein domain of which it forms a part, e.g. having the same elements of secondary structure in the same order etc. Thus, an ABM according to the present disclosure “forms part” of a three-helix bundle domain if the polypeptide according to this embodiment has the same fold as the original domain, implying that the basic structural properties are shared, those properties e.g. resulting in similar CD spectra. The skilled person is aware of other parameters that are relevant.

[0132] In one embodiment according to the first aspect of the present disclosure, the albumin binding polypeptide is a three-helix bundle protein domain, which comprises the ABM as defined above and additional sequences making up the remainder of the three-helix configuration. Thus, the present disclosure provides an albumin binding polypeptide, which comprises the amino acid sequence:

(SEQ ID NO. 1783)
LAXₐAKX_{b}X_{c}AX_{d}Xₑ ELX_{f}X_{g}Y-[ABM]

[0133] wherein

[0134] [ABM] is an albumin binding motif as defined herein,

[0135] and, independently of each other,

[0136] Xₐ is selected from C, E, Q and S;

[0137] X_{b} is selected from C, E, S and V;

[0138] X_{c} is selected from A, D, E, L and S;

[0139] X_{d} is selected from I, N and L;

[0140] Xₑ is selected from A, K, R and S;

[0141] X_{f} is selected from D and K; and

[0142] X_{g} is selected from A, C, K and S.

[0143] In one embodiment, Xₐ is selected from S and E.

[0144] In one embodiment, Xₐ is S.

[0145] In one embodiment, Xₐ is E.

[0146] In one embodiment, X_{b} is selected from C, E and S.

[0147] In one embodiment, X_{b} is selected from E and V.

[0148] In one embodiment, X_{b} is E.

[0149] In one embodiment, X_{b} is V.

[0150] In one embodiment, X_{c} is selected from A and L.

[0151] In one embodiment, X_{c} is selected from A and S.

[0152] In one embodiment, X_{c} is A.

[0153] In one embodiment, X_{c} is L.

[0154] In one embodiment, X_{d} is N.

[0155] In one embodiment, Xₑ is selected from A and R.

[0156] In one embodiment, Xₑ is selected from A and S.

[0157] In one embodiment, Xₑ is A.

[0158] In one embodiment, Xₑ is R.

[0159] In one embodiment, Xₑ is S.

[0160] In one embodiment, X_{f} is D.

[0161] In one embodiment, X_{g} is selected from C, K and S.

[0162] In one embodiment, X_{g} is selected from K and S.

[0163] In one embodiment, X_{g} is selected from C and S.

[0164] In one embodiment, X_{g} is S.

[0165] In one embodiment, X_{g} is K.

[0166] In one embodiment, X_{g} is C.

[0167] Once again, the substitution mutations designated X_{A} and X_{B} may be introduced into the sequences of albumin binding polypeptides previously described in PCT publications WO2009/016043, WO2012/004384 and WO2014/048977. In other words, the skilled person may visualize a substantial number of individual albumin binding polypeptides, in which the albumin binding motif as described herein forms a part. These sequences constitute individual embodiments of albumin binding polypeptides according to this aspect. As stated previously, the sequences of individual albumin binding polypeptides are presented in FIG. 1 and denoted SEQ ID NO:1-1768.

[0168] Thus, in one embodiment of the albumin binding polypeptide according to the disclosure, it comprises an amino acid sequence selected from the group consisting of SEQ ID NO:1-1768.

[0169] In one embodiment, X_{A} is C and X_{B} is C or K, so the albumin binding polypeptide comprises an amino acid sequence selected from the group consisting of SEQ ID NO:1, 3, 5, 7, 9, 11, 13, 15, 17, 19, 21, 23, 25, 27, 29, 31, 33, 35, 37, 39, 41, 43, 45, 47, 49, 51, 53, 55, 57, 59, 61, 63, 65, 67, 69, 71, 73, 75, 77, 79, 81, 83, 85, 87, 89, 91, 93, 95, 97, 99, 101, 103, 105, 107, 109, 111, 113, 115, 117, 119, 121, 123, 125, 127, 129, 131, 133, 135, 137, 139, 141, 143, 145, 147, 149, 151, 153, 155, 157, 159, 161, 163, 165, 167, 169, 171, 173, 175, 177, 179, 181, 183, 185, 187, 189, 191, 193, 195, 197, 199, 201, 203, 205, 207, 209, 211, 213, 215, 217, 219, 221, 223, 225, 227, 229, 231, 233, 235, 237, 239, 241, 243, 245, 247, 249, 251, 253, 255, 257, 259, 261, 263, 265, 267, 269, 271, 273, 275, 277, 279, 281, 283, 285, 287, 289, 291, 293, 295, 297, 299, 301, 303, 305, 307, 309, 311, 313, 315, 317, 319, 321, 323, 325, 327, 329, 331, 333, 335, 337, 339, 341, 343, 345, 347, 349, 351, 353, 355, 357, 359, 361, 363, 365, 367, 369, 371, 373, 375, 377, 379, 381, 383, 385, 387, 389, 391, 393, 395, 397, 399, 401, 403, 405, 407, 409, 411, 413, 415, 417, 419, 421, 423, 425, 427, 429, 431, 433, 435, 437, 439, 441, 443, 445, 447, 449, 451, 453, 455, 457, 459, 461, 463, 465, 467, 469, 471, 473, 475, 477, 479, 481, 483, 485, 487, 489, 491, 493, 495, 497, 499, 501, 503, 505, 507, 509, 511, 513, 515, 517, 519, 521, 523, 525, 527, 529, 531, 533, 535, 537, 539, 541, 543, 545, 547, 549, 551, 553, 555, 557, 559, 561, 563, 565, 567, 569, 571, 573, 575, 577, 579, 581, 583, 585, 587, 589, 591, 593, 595, 597, 599, 601, 603, 605, 607, 609, 611, 613, 615, 617, 619, 621, 623, 625, 627, 629, 631, 633, 635, 637, 639, 641, 643, 645, 647, 649, 651, 653, 655, 657, 659, 661, 663, 665, 667, 669, 671, 673, 675, 677, 679, 681, 683, 685, 687, 689, 691, 693, 695, 697, 699, 701, 703, 705, 707, 709, 711, 713, 715, 717, 719, 721, 723, 725, 727, 729, 731, 733, 735, 737, 739, 741, 743, 745, 747, 749, 751, 753, 755, 757, 759, 761, 763, 765, 767, 769, 771, 773, 775, 777, 779, 781, 783, 785, 787, 789, 791, 793, 795, 797, 799, 801, 803, 805, 807, 809, 811, 813, 815, 817, 819, 821, 823, 825, 827, 829, 831, 833, 835, 837, 839, 841, 843, 845, 847, 849, 851, 853, 855, 857, 859, 861, 863, 865, 867, 869, 871, 873, 875, 877, 879, 881, 883, 885, 887, 889, 891, 893, 895, 897, 899, 901, 903, 905, 907, 909, 911, 913, 915, 917, 919, 921, 923, 925, 927, 929, 931, 933, 935, 937, 939, 941, 943, 945, 947, 949, 951, 953, 955, 957, 959, 961, 963, 965, 967, 969, 971, 973, 975, 977, 979, 981, 983, 985, 987, 989, 991, 993, 995, 997, 999, 1001, 1003, 1005, 1007, 1009, 1011, 1013, 1015, 1017, 1019, 1021, 1023, 1025, 1027, 1029, 1031, 1033, 1035, 1037, 1039, 1041, 1043, 1045, 1047, 1049, 1051, 1053, 1055, 1057, 1059, 1061, 1063, 1065, 1067, 1069, 1071, 1073, 1075, 1077, 1079, 1081, 1083, 1085, 1087, 1089, 1091, 1093, 1095, 1097, 1099, 1101, 1103, 1105, 1107, 1109, 1111, 1113, 1115, 1117, 1119, 1121, 1123, 1125, 1127, 1129, 1131, 1133, 1135, 1137, 1139, 1141, 1143, 1145, 1147, 1149, 1151, 1153, 1155, 1157, 1159, 1161, 1163, 1165, 1167, 1169, 1171, 1173, 1175, 1177, 1179, 1181, 1183, 1185, 1187, 1189, 1191, 1193, 1195, 1197, 1199, 1201, 1203, 1205, 1207, 1209, 1211, 1213, 1215, 1217, 1219, 1221, 1223, 1225, 1227, 1229, 1231, 1233, 1235, 1237, 1239, 1241, 1243, 1245, 1247, 1249, 1251, 1253, 1255, 1257, 1259, 1261, 1263, 1265, 1267, 1269, 1271, 1273, 1275, 1277, 1279, 1281, 1283, 1285, 1287, 1289, 1291, 1293, 1295, 1297, 1299, 1301, 1303, 1305, 1307, 1309, 1311, 1313, 1315, 1317, 1319, 1321, 1323, 1325, 1327, 1329, 1331, 1333, 1335, 1337, 1339, 1341, 1343, 1345, 1347, 1349, 1351, 1353, 1355, 1357, 1359, 1361, 1363, 1365, 1367, 1369, 1371, 1373, 1375, 1377, 1379, 1381, 1383, 1385, 1387, 1389, 1391, 1393, 1395, 1397, 1399, 1401, 1403, 1405, 1407, 1409, 1411, 1413, 1415, 1417, 1419, 1421, 1423, 1425, 1427, 1429, 1431, 1433, 1435, 1437, 1439, 1441, 1443, 1445, 1447, 1449, 1451, 1453, 1455, 1457, 1459, 1461, 1463, 1465, 1467, 1469, 1471, 1473, 1475, 1477, 1479, 1481, 1483, 1485, 1487, 1489, 1491, 1493, 1495, 1497, 1499, 1501, 1503, 1505, 1507, 1509, 1511, 1513, 1515, 1517, 1519, 1521, 1523, 1525, 1527, 1529, 1531, 1533, 1535, 1537, 1539, 1541, 1543, 1545, 1547, 1549, 1551, 1553, 1555, 1557, 1559, 1561, 1563, 1565, 1567, 1569, 1571, 1573, 1575, 1577, 1579, 1581, 1583, 1585, 1587, 1589, 1591, 1593, 1595, 1597, 1599, 1601, 1603, 1605, 1607, 1609, 1611, 1613, 1615, 1617, 1619, 1621, 1623, 1625, 1627, 1629, 1631, 1633, 1635, 1637, 1639, 1641, 1643, 1645, 1647, 1649, 1651, 1653, 1655, 1657, 1659, 1661, 1663, 1665, 1667, 1669, 1671, 1673, 1675, 1677, 1679, 1681, 1683, 1685, 1687, 1689, 1691, 1693, 1695, 1697, 1699, 1701, 1703, 1705, 1707, 1709, 1711, 1713, 1715, 1717, 1719, 1721, 1723, 1725, 1727, 1729, 1731, 1733, 1735, 1737, 1739, 1741, 1743, 1745, 1747, 1749, 1751, 1753, 1755, 1757, 1759, 1761, 1763, 1765 and 1767.

[0170] In another embodiment, X_{A} is C and X_{B} is K, so the albumin binding polypeptide comprises an amino acid sequence selected from the group consisting of SEQ ID NO:1, 5, 9, 13, 17, 21, 25, 29, 33, 37, 41, 45, 49, 53, 57, 61, 65, 69, 73, 77, 81, 85, 89, 93, 97, 101, 105, 109, 113, 117, 121, 125, 129, 133, 137, 141, 145, 149, 153, 157, 161, 165, 169, 173, 177, 181, 185, 189, 193, 197, 201, 205, 209, 213, 217, 221, 225, 229, 233, 237, 241, 245, 249, 253, 257, 261, 265, 269, 273, 277, 281, 285, 289, 293, 297, 301, 305, 309, 313, 317, 321, 325, 329, 333, 337, 341, 345, 349, 353, 357, 361, 365, 369, 373, 377, 381, 385, 389, 393, 397, 401, 405, 409, 413, 417, 421, 425, 429, 433, 437, 441, 445, 449, 453, 457, 461, 465, 469, 473, 477, 481, 485, 489, 493, 497, 501, 505, 509, 513, 517, 521, 525, 529, 533, 537, 541, 545, 549, 553, 557, 561, 565, 569, 573, 577, 581, 585, 589, 593, 597, 601, 605, 609, 613, 617, 621, 625, 629, 633, 637, 641, 645, 649, 653, 657, 661, 665, 669, 673, 677, 681, 685, 689, 693, 697, 701, 705, 709, 713, 717, 721, 725, 729, 733, 737, 741, 745, 749, 753, 757, 761, 765, 769, 773, 777, 781, 785, 789, 793, 797, 801, 805, 809, 813, 817, 821, 825, 829, 833, 837, 841, 845, 849, 853, 857, 861, 865, 869, 873, 877, 881, 885, 889, 893, 897, 901, 905, 909, 913, 917, 921, 925, 929, 933, 937, 941, 945, 949, 953, 957, 961, 965, 969, 973, 977, 981, 985, 989, 993, 997, 1001, 1005, 1009, 1013, 1017, 1021, 1025, 1029, 1033, 1037, 1041, 1045, 1049, 1053, 1057, 1061, 1065, 1069, 1073, 1077, 1081, 1085, 1089, 1093, 1097, 1101, 1105, 1109, 1113, 1117, 1121, 1125, 1129, 1133, 1137, 1141, 1145, 1149, 1153, 1157, 1161, 1165, 1169, 1173, 1177, 1181, 1185, 1189, 1193, 1197, 1201, 1205, 1209, 1213, 1217, 1221, 1225, 1229, 1233, 1237, 1241, 1245, 1249, 1253, 1257, 1261, 1265, 1269, 1273, 1277, 1281, 1285, 1289, 1293, 1297, 1301, 1305, 1309, 1313, 1317, 1321, 1325, 1329, 1333, 1337, 1341, 1345, 1349, 1353, 1357, 1361, 1365, 1369, 1373, 1377, 1381, 1385, 1389, 1393, 1397, 1401, 1405, 1409, 1413, 1417, 1421, 1425, 1429, 1433, 1437, 1441, 1445, 1449, 1453, 1457, 1461, 1465, 1469, 1473, 1477, 1481, 1485, 1489, 1493, 1497, 1501, 1505, 1509, 1513, 1517, 1521, 1525, 1529, 1533, 1537, 1541, 1545, 1549, 1553, 1557, 1561, 1565, 1569, 1573, 1577, 1581, 1585, 1589, 1593, 1597, 1601, 1605, 1609, 1613, 1617, 1621, 1625, 1629, 1633, 1637, 1641, 1645, 1649, 1653, 1657, 1661, 1665, 1669, 1673, 1677, 1681, 1685, 1689, 1693, 1697, 1701, 1705, 1709, 1713, 1717, 1721, 1725, 1729, 1733, 1737, 1741, 1745, 1749, 1753, 1757, 1761 and 1765.

[0171] In another embodiment, the albumin binding polypeptide comprises one of the sequences listed in PCT publication WO2009/016043, mutated as described herein through substitution in the X_{A} and X_{B} positions. Thus, in this embodiment, the albumin binding polypeptide comprises an amino acid sequence selected from the group consisting of SEQ ID NO:5-1004.

[0172] In another embodiment, X_{A} is C and X_{B} is C or K in these sequences from WO2009/016043, so the albumin binding polypeptide comprises an amino acid sequence selected from the group consisting of SEQ ID NO:5, 7, 9, 11, 13, 15, 17, 19, 21, 23, 25, 27, 29, 31, 33, 35, 37, 39, 41, 43, 45, 47, 49, 51, 53, 55, 57, 59, 61, 63, 65, 67, 69, 71, 73, 75, 77, 79, 81, 83, 85, 87, 89, 91, 93, 95, 97, 99, 101, 103, 105, 107, 109, 111, 113, 115, 117, 119, 121, 123, 125, 127, 129, 131, 133, 135, 137, 139, 141, 143, 145, 147, 149, 151, 153, 155, 157, 159, 161, 163, 165, 167, 169, 171, 173, 175, 177, 179, 181, 183, 185, 187, 189, 191, 193, 195, 197, 199, 201, 203, 205, 207, 209, 211, 213, 215, 217, 219, 221, 223, 225, 227, 229, 231, 233, 235, 237, 239, 241, 243, 245, 247, 249, 251, 253, 255, 257, 259, 261, 263, 265, 267, 269, 271, 273, 275, 277, 279, 281, 283, 285, 287, 289, 291, 293, 295, 297, 299, 301, 303, 305, 307, 309, 311, 313, 315, 317, 319, 321, 323, 325, 327, 329, 331, 333, 335, 337, 339, 341, 343, 345, 347, 349, 351, 353, 355, 357, 359, 361, 363, 365, 367, 369, 371, 373, 375, 377, 379, 381, 383, 385, 387, 389, 391, 393, 395, 397, 399, 401, 403, 405, 407, 409, 411, 413, 415, 417, 419, 421, 423, 425, 427, 429, 431, 433, 435, 437, 439, 441, 443, 445, 447, 449, 451, 453, 455, 457, 459, 461, 463, 465, 467, 469, 471, 473, 475, 477, 479, 481, 483, 485, 487, 489, 491, 493, 495, 497, 499, 501, 503, 505, 507, 509, 511, 513, 515, 517, 519, 521, 523, 525, 527, 529, 531, 533, 535, 537, 539, 541, 543, 545, 547, 549, 551, 553, 555, 557, 559, 561, 563, 565, 567, 569, 571, 573, 575, 577, 579, 581, 583, 585, 587, 589, 591, 593, 595, 597, 599, 601, 603, 605, 607, 609, 611, 613, 615, 617, 619, 621, 623, 625, 627, 629, 631, 633, 635, 637, 639, 641, 643, 645, 647, 649, 651, 653, 655, 657, 659, 661, 663, 665, 667, 669, 671, 673, 675, 677, 679, 681, 683, 685, 687, 689, 691, 693, 695, 697, 699, 701, 703, 705, 707, 709, 711, 713, 715, 717, 719, 721, 723, 725, 727, 729, 731, 733, 735, 737, 739, 741, 743, 745, 747, 749, 751, 753, 755, 757, 759, 761, 763, 765, 767, 769, 771, 773, 775, 777, 779, 781, 783, 785, 787, 789, 791, 793, 795, 797, 799, 801, 803, 805, 807, 809, 811, 813, 815, 817, 819, 821, 823, 825, 827, 829, 831, 833, 835, 837, 839, 841, 843, 845, 847, 849, 851, 853, 855, 857, 859, 861, 863, 865, 867, 869, 871, 873, 875, 877, 879, 881, 883, 885, 887, 889, 891, 893, 895, 897, 899, 901, 903, 905, 907, 909, 911, 913, 915, 917, 919, 921, 923, 925, 927, 929, 931, 933, 935, 937, 939, 941, 943, 945, 947, 949, 951, 953, 955, 957, 959, 961, 963, 965, 967, 969, 971, 973, 975, 977, 979, 981, 983, 985, 987, 989, 991, 993, 995, 997, 999, 1001 and 1003.

[0173] In another embodiment, X_{A} is C and X_{B} is K in these sequences from WO2009/016043, so the albumin binding polypeptide comprises an amino acid sequence selected from the group consisting of SEQ ID NO:5, 9, 13, 17, 21, 25, 29, 33, 37, 41, 45, 49, 53, 57, 61, 65, 69, 73, 77, 81, 85, 89, 93, 97, 101, 105, 109, 113, 117, 121, 125, 129, 133, 137, 141, 145, 149, 153, 157, 161, 165, 169, 173, 177, 181, 185, 189, 193, 197, 201, 205, 209, 213, 217, 221, 225, 229, 233, 237, 241, 245, 249, 253, 257, 261, 265, 269, 273, 277, 281, 285, 289, 293, 297, 301, 305, 309, 313, 317, 321, 325, 329, 333, 337, 341, 345, 349, 353, 357, 361, 365, 369, 373, 377, 381, 385, 389, 393, 397, 401, 405, 409, 413, 417, 421, 425, 429, 433, 437, 441, 445, 449, 453, 457, 461, 465, 469, 473, 477, 481, 485, 489, 493, 497, 501, 505, 509, 513, 517, 521, 525, 529, 533, 537, 541, 545, 549, 553, 557, 561, 565, 569, 573, 577, 581, 585, 589, 593, 597, 601, 605, 609, 613, 617, 621, 625, 629, 633, 637, 641, 645, 649, 653, 657, 661, 665, 669, 673, 677, 681, 685, 689, 693, 697, 701, 705, 709, 713, 717, 721, 725, 729, 733, 737, 741, 745, 749, 753, 757, 761, 765, 769, 773, 777, 781, 785, 789, 793, 797, 801, 805, 809, 813, 817, 821, 825, 829, 833, 837, 841, 845, 849, 853, 857, 861, 865, 869, 873, 877, 881, 885, 889, 893, 897, 901, 905, 909, 913, 917, 921, 925, 929, 933, 937, 941, 945, 949, 953, 957, 961, 965, 969, 973, 977, 981, 985, 989, 993, 997 and 1001.

[0174] In another embodiment, the albumin binding polypeptide comprises a mutated version of any one of the albumin binding motif sequences disclosed in claim 24 of WO2009/016043. Thus, in this embodiment, the albumin binding polypeptide comprises an amino acid sequence selected from the group consisting of SEQ ID NO:9-12, 13-16, 37-40, 61-64, 101-104, 109-112, 185-188, 197-200, 213-216, 217-220, 221-224, 617-620, 925-928, 929-932, 933-936, 937-940, 941-944, 945-948 and 949-952.

[0175] In another embodiment, X_{A} is C and X_{B} is C or K in these sequences from claim 24 of WO2009/016043, so the albumin binding polypeptide comprises an amino acid sequence selected from the group consisting of SEQ ID NO: 9, 11, 13, 15, 37, 39, 61, 63, 101, 103, 109, 111, 185, 187, 197, 199, 213, 215, 217, 219, 221, 223, 617, 619, 925, 927, 929, 931, 933, 935, 937, 939, 941, 943, 945, 947, 949 and 951.

[0176] In another embodiment, X_{A} is C and X_{B} is K in these sequences from claim 24 of WO2009/016043, so the albumin binding polypeptide comprises an amino acid sequence selected from the group consisting of SEQ ID NO:9, 13, 37, 61, 101, 109, 185, 197, 213, 217, 221, 617, 925, 929, 933, 937, 941, 945 and 949.

[0177] In another embodiment the albumin binding polypeptide comprises a mutated version of any one of the albumin binding motif sequences disclosed in claim 25 of WO2009/016043. Thus, in this embodiment, the albumin binding polypeptide comprises an amino acid sequence selected from the group consisting of SEQ ID NO:9-12, 213-216 and 925-928.

[0178] In another embodiment, X_{A} is C and X_{B} is C or K in these sequences from claim 25 of WO2009/016043, so the albumin binding polypeptide comprises an amino acid sequence selected from the group consisting of SEQ ID NO:9, 11, 213, 215, 925 and 927.

[0179] In another embodiment, X_{A} is C and X_{B} is K in these sequences from claim 25 of WO2009/016043, so the albumin binding polypeptide comprises an amino acid sequence selected from the group consisting of SEQ ID NO:9, 213 and 925, such as SEQ ID NO:925.

[0180] In another embodiment, the albumin binding polypeptide comprises one of the sequences listed in PCT publication WO2012/004384, mutated as described herein through substitution in the X_{A} and X_{B} positions. Thus, in this embodiment, the albumin binding polypeptide comprises an amino acid sequence selected from the group consisting of SEQ ID NO:1-4 and 1005-1736. In another embodiment, the albumin binding polypeptide comprises an amino acid sequence selected from SEQ ID NO:1-4.

[0181] In another embodiment, X_{A} is C and X_{B} is C or K in these sequences from WO2012/004384, so the albumin binding polypeptide comprises an amino acid sequence selected from the group consisting of SEQ ID NO:1, 3, 1005, 1007, 1009, 1011, 1013, 1015, 1017, 1019, 1021, 1023, 1025, 1027, 1029, 1031, 1033, 1035, 1037, 1039, 1041, 1043, 1045, 1047, 1049, 1051, 1053, 1055, 1057, 1059, 1061, 1063, 1065, 1067, 1069, 1071, 1073, 1075, 1077, 1079, 1081, 1083, 1085, 1087, 1089, 1091, 1093, 1095, 1097, 1099, 1101, 1103, 1105, 1107, 1109, 1111, 1113, 1115, 1117, 1119, 1121, 1123, 1125, 1127, 1129, 1131, 1133, 1135, 1137, 1139, 1141, 1143, 1145, 1147, 1149, 1151, 1153, 1155, 1157, 1159, 1161, 1163, 1165, 1167, 1169, 1171, 1173, 1175, 1177, 1179, 1181, 1183, 1185, 1187, 1189, 1191, 1193, 1195, 1197, 1199, 1201, 1203, 1205, 1207, 1209, 1211, 1213, 1215, 1217, 1219, 1221, 1223, 1225, 1227, 1229, 1231, 1233, 1235, 1237, 1239, 1241, 1243, 1245, 1247, 1249, 1251, 1253, 1255, 1257, 1259, 1261, 1263, 1265, 1267, 1269, 1271, 1273, 1275, 1277, 1279, 1281, 1283, 1285, 1287, 1289, 1291, 1293, 1295, 1297, 1299, 1301, 1303, 1305, 1307, 1309, 1311, 1313, 1315, 1317, 1319, 1321, 1323, 1325, 1327, 1329, 1331, 1333, 1335, 1337, 1339, 1341, 1343, 1345, 1347, 1349, 1351, 1353, 1355, 1357, 1359, 1361, 1363, 1365, 1367, 1369, 1371, 1373, 1375, 1377, 1379, 1381, 1383, 1385, 1387, 1389, 1391, 1393, 1395, 1397, 1399, 1401, 1403, 1405, 1407, 1409, 1411, 1413, 1415, 1417, 1419, 1421, 1423, 1425, 1427, 1429, 1431, 1433, 1435, 1437, 1439, 1441, 1443, 1445, 1447, 1449, 1451, 1453, 1455, 1457, 1459, 1461, 1463, 1465, 1467, 1469, 1471, 1473, 1475, 1477, 1479, 1481, 1483, 1485, 1487, 1489, 1491, 1493, 1495, 1497, 1499, 1501, 1503, 1505, 1507, 1509, 1511, 1513, 1515, 1517, 1519, 1521, 1523, 1525, 1527, 1529, 1531, 1533, 1535, 1537, 1539, 1541, 1543, 1545, 1547, 1549, 1551, 1553, 1555, 1557, 1559, 1561, 1563, 1565, 1567, 1569, 1571, 1573, 1575, 1577, 1579, 1581, 1583, 1585, 1587, 1589, 1591, 1593, 1595, 1597, 1599, 1601, 1603, 1605, 1607, 1609, 1611, 1613, 1615, 1617, 1619, 1621, 1623, 1625, 1627, 1629, 1631, 1633, 1635, 1637, 1639, 1641, 1643, 1645, 1647, 1649, 1651, 1653, 1655, 1657, 1659, 1661, 1663, 1665, 1667, 1669, 1671, 1673, 1675, 1677, 1679, 1681, 1683, 1685, 1687, 1689, 1691, 1693, 1695, 1697, 1699, 1701, 1703, 1705, 1707, 1709, 1711, 1713, 1715, 1717, 1719, 1721, 1723, 1725, 1727, 1729, 1731, 1733 and 1735.

[0182] In another embodiment, X_{A} is C and X_{B} is K in these sequences from WO2012/004384, so the albumin binding polypeptide comprises an amino acid sequence selected from the group consisting of SEQ ID NO:1, 1005, 1009, 1013, 1017, 1021, 1025, 1029, 1033, 1037, 1041, 1045, 1049, 1053, 1057, 1061, 1065, 1069, 1073, 1077, 1081, 1085, 1089, 1093, 1097, 1101, 1105, 1109, 1113, 1117, 1121, 1125, 1129, 1133, 1137, 1141, 1145, 1149, 1153, 1157, 1161, 1165, 1169, 1173, 1177, 1181, 1185, 1189, 1193, 1197, 1201, 1205, 1209, 1213, 1217, 1221, 1225, 1229, 1233, 1237, 1241, 1245, 1249, 1253, 1257, 1261, 1265, 1269, 1273, 1277, 1281, 1285, 1289, 1293, 1297, 1301, 1305, 1309, 1313, 1317, 1321, 1325, 1329, 1333, 1337, 1341, 1345, 1349, 1353, 1357, 1361, 1365, 1369, 1373, 1377, 1381, 1385, 1389, 1393, 1397, 1401, 1405, 1409, 1413, 1417, 1421, 1425, 1429, 1433, 1437, 1441, 1445, 1449, 1453, 1457, 1461, 1465, 1469, 1473, 1477, 1481, 1485, 1489, 1493, 1497, 1501, 1505, 1509, 1513, 1517, 1521, 1525, 1529, 1533, 1537, 1541, 1545, 1549, 1553, 1557, 1561, 1565, 1569, 1573, 1577, 1581, 1585, 1589, 1593, 1597, 1601, 1605, 1609, 1613, 1617, 1621, 1625, 1629, 1633, 1637, 1641, 1645, 1649, 1653, 1657, 1661, 1665, 1669, 1673, 1677, 1681, 1685, 1689, 1693, 1697, 1701, 1705, 1709, 1713, 1717, 1721, 1725, 1729 and 1733.

[0183] In another embodiment, the albumin binding polypeptide comprises a mutated version of any one of the amino acid sequences specified in claim 23 of WO2012/004384. Thus, in this embodiment, the albumin binding polypeptide comprises an amino acid sequence selected from the group consisting of SEQ ID NO:1-4, 1017-1020, 1021-1024, 1029-1032, 1033-1036, 1041-1044, 1045-1048, 1053-1056, 1061-1064, 1065-1068, 1073-1076, 1077-1080, 1085-1088, 1089-1092, 1097-1100, 1101-1104, 1109-1112, 1113-1116, 1121-1124, 1125-1128, 1133-1136, 1137-1140, 1145-1148, 1149-1152, 1161-1164, 1165-1168, 1193-1196, 1197-1200, 1577-1580, 1581-1584, 1585-1588, 1589-1592, 1593-1596, 1597-1600, 1601-1604, 1689-1692, 1693-1696, 1697-1700, 1701-1704, 1705-1708, 1709-1712, 1713-1716, 1717-1720, 1721-1724, 1725-1728, 1729-1732 and 1733-1736.

[0184] In another embodiment, X_{A} is C and X_{B} is C or K in these sequences from claim 23 of WO2012/004384, so the albumin binding polypeptide comprises an amino acid sequence selected from the group consisting of SEQ ID NO:1, 3, 1017, 1019, 1021, 1023, 1029, 1031, 1033, 1035, 1041, 1043, 1045, 1047, 1053, 1055, 1061, 1063, 1065, 1067, 1073, 1075, 1077, 1079, 1085, 1087, 1089, 1091, 1097, 1099, 1101, 1103, 1109, 1111, 1113, 1115, 1121, 1123, 1125, 1127, 1133, 1135, 1137, 1139, 1145, 1147, 1149, 1151, 1161, 1163, 1165, 1167, 1193, 1195, 1197, 1199, 1577, 1579, 1581, 1583, 1585, 1587, 1589, 1591, 1593, 1595, 1597, 1599, 1601, 1603, 1689, 1691, 1693, 1695, 1697, 1699, 1701, 1703, 1705, 1707, 1709, 1711, 1713, 1715, 1717, 1719, 1721, 1723, 1725, 1727, 1729, 1731, 1733 and 1735.

[0185] In another embodiment, X_{A} is C and X_{B} is K in these sequences from claim 23 of WO2012/004384, so the albumin binding polypeptide comprises an amino acid sequence selected from the group consisting of SEQ ID NO:1, 1017, 1021, 1029, 1033, 1041, 1045, 1053, 1061, 1065, 1073, 1077, 1085, 1089, 1097, 1101, 1109, 1113, 1121, 1125, 1133, 1137, 1145, 1149, 1161, 1165, 1193, 1197, 1577, 1581, 1585, 1589, 1593, 1597, 1601, 1689, 1693, 1697, 1701, 1705, 1709, 1713, 1717, 1721, 1725, 1729 and 1733.

[0186] In another embodiment, the albumin binding polypeptide comprises an ABM sequence listed in PCT publication WO2014/048977, mutated as described herein through substitution in the X_{A} and X_{B} positions. Thus, in this embodiment, the albumin binding polypeptide comprises an amino acid sequence selected from the group consisting of SEQ ID NO:1737-1768.

[0187] In another embodiment, X_{A} is C and X_{B} is C or K in these sequences from PCT publication WO2014/048977, so the albumin binding polypeptide comprises an amino acid sequence selected from the group consisting of SEQ ID NO: 1737, 1739, 1741, 1743, 1745, 1747, 1749, 1751, 1753, 1755, 1757, 1759, 1761, 1763, 1765 and 1767.

[0188] In another embodiment, X_{A} is C and X_{B} is K in these sequences from PCT publication WO2014/048977, so the albumin binding polypeptide comprises an amino acid sequence selected from the group consisting of SEQ ID NO: 1737, 1741, 1745, 1749, 1753, 1757, 1761 and 1765.

[0189] In another embodiment, the albumin binding polypeptide comprises an ABM sequence which is a mutated version of the albumin binding motif sequence disclosed in claim 2 of PCT publication WO2014/048977. Thus, in this embodiment, the albumin binding polypeptide comprises an amino acid sequence selected from the group consisting of SEQ ID NO:1737-1740.

[0190] In another embodiment, X_{A} is C and X_{B} is C or K in this sequence from claim 2 of PCT publication WO2014/048977, so the albumin binding polypeptide comprises an amino acid sequence selected from the group consisting of SEQ ID NO: 1737 and 1739.

[0191] In another embodiment, X_{A} is C and X_{B} is K in this sequence from claim 2 of PCT publication WO2014/048977, so the albumin binding polypeptide comprises SEQ ID NO:1737.

[0192] In one embodiment, K, when present in position X_{A} or X_{B}, is functionalized. Such functionalization may for example be by a method selected from haloacetylation, maleimide functionalization and pyridyldithiol functionalization. Thus, in one embodiment, K, when present in position X_{A} or X_{B}, comprises a halooacetyl group, such as a flouroacetyl group, chloroacetyl group, bromoacetyl group or iodoacetyl group. In another embodiment, K, when present in position X_{A} or X_{B}, comprises a chloroacetyl group.

[0193] In one embodiment of the first aspect of the present disclosure, there is provided an albumin binding polypeptide as defined herein, wherein the amino acid sequence of said albumin binding polypeptide is crosslinked. In one embodiment, said crosslink extends between the amino acid residue in position X_{A} and the amino acid residue in position X_{B} of the amino acid sequence.

[0194] Crosslinking is a method that can be used in order to stabilize proteins in a specific three dimensional conformation. As used herein, the term “crosslinking” involves covalently attaching a protein to another macromolecule, such as another protein, or to the same macromolecule, such as the same protein, or to something else, such as a solid support. Hence, crosslinking may be intra-molecular and inter-molecular, such as intra-molecular crosslinking within an albumin binding polypeptide as defined herein.

[0195] Herein, the terms “crosslinker” and “crosslinking agent” refer to a molecule with at least two reactive ends, which may be used to connect polymer chains, such as amino acid chains. Crosslinkers are usually reactive toward functional groups common on amino acids, such as carboxyl groups, amine groups and sulfhydryl groups.

[0196] Known in the art are homobifunctional crosslinkers, which have the same reactive groups on each end of the crosslinker. Non-limiting examples of homobifunctional crosslinkers are dihalogenated crosslinkers, dimaleimide crosslinkers, dipyridyldithiol crosslinkers and perfluoroaromatic crosslinkers.

[0197] Also known are heterobifunctional crosslinkers, which have different reactive groups on each end of the crosslinker. Reactive groups of heterobifunctional crosslinkers may be chosen such that a specific crosslinking target (for example a protein or an amino acid residue) will bind to one end and another specific crosslinking target will bind to the other end of said crosslinker.

[0198] Thus, the skilled person is aware of many types of crosslinkers. Known in the art are for example haloacetyl and maleimide crosslinkers, which react with sulfhydryl groups at physiological pH to form thioether linkages. Also known are pyridyl disulfide crosslinkers, which react with sulfhydryl groups to form disulfide bonds. Other types of crosslinkers include N-hydroxysuccinimide esters, imido esters, carbodiimides and diazirines. Examples of some common crosslinkers are the imido ester crosslinker dimethyl suberimidate and the N-hydroxysuccinimide ester crosslinker BS3. These crosslinkers induce a nucleophilic attack of the amino group of the lysine side chain, resulting in covalent bond formation via the crosslinker.

[0199] Crosslinking may involve chemoselective crosslinking chemistries, such as thioether bond formation between a haloacetylated, maleimide-functionalized or pyridyldithiol-functionalized lysine residue and the thiol group of a cysteine residue. Another example is thioether bond formation between a haloacetylated, maleimide-functionalized or pyridyldithiol-functionalized lysine residue and a lysine residue modified by coupling of a thiol-containing reagent, such as mercaptoacetic acid or mercaptopropionic acid to the lysine amino group. Chemoselective crosslinking chemistries may also involve thioether bond formation between the thiol groups of two cysteine residues and a bifunctional dihalogenated linker, dimaleimide linker, dipyridyldithiol linker or perfluoroaromatic linker. Also, chemoselective crosslinking chemistries may involve disulfide bond formation between thiol groups of cysteine residues and/or thiol groups of lysine residues modified by coupling of thiol-containing reagents thereto as described above; oxime bond formation between an aminooxy-modified amino acid residue and an aldehyde-modified or ketone-modified amino acid residue, bond formation via Staudinger reaction between an azido-modified amino acid residue and a triarylphosphine-modified amino acid residue as well as bond formation via native chemical ligation reaction between a thioester-modified amino acid residue and a cysteine-modified amino acid residue. The skilled person will appreciate that said crosslink can be obtained by any chemoselective crosslinking chemistry mentioned above or any other suitable chemistry or method.

[0200] Thus, in one embodiment, there is provided a crosslinked albumin binding polypeptide, wherein said crosslink is selected from the group comprising
[0201] thioether bond between a haloacetylated lysine residue and a thiol group of a cysteine residue or thiol-modified lysine residue,
[0202] thioether bond between a maleimide-functionalized lysine residue and a thiol group of a cysteine residue or thiol-modified lysine residue,
[0203] thioether bond between a pyridyldithiol-functionalized lysine residue and a thiol group of a cysteine residue or thiol-modified lysine residue,
[0204] thioether bond between the thiol groups of cysteine residues or thiol-modified lysine residues and a bifunctional dihalogenated linker,
[0205] thioether bond between the thiol groups of cysteine residues or thiol-modified lysine residues and a bifunctional dimaleimide linker,
[0206] thioether bond between the thiol groups of cysteine residues or thiol-modified lysine residues and a bifunctional dipyridyldithiol linker,
[0207] thioether bond between the thiol groups of cysteine residues or thiol-modified lysine residues and a bifunctional perfluoroaromatic linker,
[0208] disulfide bond between the thiol groups of cysteine residues or thiol-modified lysine residues,
[0209] oxime bond between an aminooxy-modified amino acid residue and an aldehyde-modified amino acid residue,
[0210] oxime bond between an aminooxy-modified amino acid residue and a ketone-modified amino acid residue,
[0211] bond formed by Cu-catalyzed cycloaddition between an azido-modified amino acid residue and an alkyne-modified amino acid residue,
[0212] bond formed by Staudinger reaction between an azido-modified amino acid residue and a triarylphosphine-modified amino acid residue, and
[0213] bond formed by native chemical ligation reaction between a thioester-modified amino acid residue and a cysteine-modified amino acid residue.

[0214] In one embodiment, said crosslink is a thioether bond, such as a thioether bond between a haloacetylated lysine residue and the thiol group of a cysteine residue. For example, such a thioether bond may be between a chloroacetylated lysine residue and the thiol group of a cysteine residue. In another embodiment, said thioether bond is between a chloroacetylated lysine residue and the thiol group of a mercaptoacetylated lysine residue.

[0215] In another embodiment, said crosslink is a disulfide bond between the thiol groups of two cysteine residues, such as a disulfide bond obtained by using a dihalide crosslinker. In one embodiment, said crosslinker is selected from the group consisting of o-xylylene dibromide, m-xylylene dibromide, p-xylylene dibromide, 2,3-bis(bromomethyl)quinoxaline and 2,6-bis(bromomethyl)pyridine, such as from the group consisting of o-xylylene dibromide, m-xylylene dibromide and 2,6-bis(bromomethyl)pyridine.

[0216] As stated above, the skilled person is aware that the function of any polypeptide, such as the albumin binding capacity of the polypeptides according to the present disclosure, is dependent on the tertiary structure of said polypeptide. The skilled person is also aware of the three-helix bundle domain structure of G148-GA3 and its various known derivatives, and thus appreciates that the albumin binding polypeptides described herein need to retain essentially the same tertiary structure when crosslinked as their non-crosslinked counterpart or counterparts in order to retain essentially the same albumin binding properties. In one embodiment, there is provided a crosslinked albumin binding polypeptide, in which said albumin binding motif retains a two alpha helix conformation. In another embodiment, there is provided a crosslinked albumin binding polypeptide, wherein said albumin binding motif forms part of a polypeptide which retains a three-helix bundle conformation.

[0217] The present disclosure contemplates albumin binding polypeptides with a high level of resistance to proteolytic cleavage, such as proteolytic cleavage within the gastrointestinal tract. Without wishing to be bound by theory, in embodiments in which the albumin binding polypeptide is crosslinked, it is thought that it is the crosslink that provides such resistance. Albumin binding polypeptides which exhibit such increased resistance to proteolytic cleavage may more suitable for oral delivery.

[0218] Examples of proteolytic enzymes present in the gastrointestinal tract are pepsin, found in the stomach, trypsin and chymotrypsin, both found in the duodenum.

[0219] Thus, in one embodiment there is provided an albumin binding polypeptide that is resistant to proteolytic cleavage, such as proteolytic cleavage by at least one protease of the gastrointestinal tract. In one embodiment, said at least one protease is selected from the group consisting of pepsin, trypsin and chymotrypsin, and all possible combinations thereof. In another embodiment, said at least one protease is pepsin. In another embodiment, said at least one protease is trypsin. In another embodiment, said at least one protease is chymotrypsin.

[0220] In one embodiment of the present aspect of the disclosure, there is provided an albumin binding polypeptide, which exhibits a melting temperature (Tm) of at least 37° C., for example at least 39° C., for example at least 41° C., for example at least 43° C., for example at least 45° C., for example at least 47° C., for example at least 49° C., for example at least 51° C., for example at least 53° C., for example at least 55° C., for example at least 57° C., for example at least 59° C., for example at least 61° C., for example at least 63° C., for example at least 65° C., for example at least 67° C., for example at least 69° C., for example at least 71° C., for example at least 73° C., for example at least 75° C.

[0221] The terms “albumin binding” and “binding affinity for albumin” as used in this specification refer to a property of a polypeptide which may be tested for example by the use of surface plasmon resonance technology, such as in Biacore (GE Healthcare) or ProteOn XPR 36 (Bio-Rad) instrument. For example as described in the examples below, albumin binding affinity may be tested in an experiment in which albumin, or a fragment thereof, is immobilized on a sensor chip of the instrument, and the sample containing the polypeptide to be tested is passed over the chip. Alternatively, the polypeptide to be tested is immobilized on a sensor chip of the instrument, and a sample containing albumin, or a fragment thereof, is passed over the chip. Albumin may, in this regard, be serum albumin from a mammal, such as human serum albumin. The skilled person may then interpret the results obtained by such experiments to establish at least a qualitative measure of the binding affinity of the polypeptide for albumin. If a quantitative measure is desired, for example to determine a K_{D} value for the interaction, surface plasmon resonance methods may also be used. Binding values may for example be defined in a Biacore2000 instrument (GE Healthcare). Albumin is suitably immobilized on a sensor chip of the measurement, and samples of the polypeptide whose affinity is to be determined are prepared by serial dilution and injected in random order. K_{D} values may then be calculated from the results using for example the 1:1 Langmuir binding model of the BIAevaluation 4.1 software, or other suitable software, provided by the instrument manufacturer.

[0222] In embodiments of this aspect of the disclosure, there is provided an albumin binding polypeptide which binds to albumin such that the K_{D} value of the interaction is at most 1×10⁻⁸ M, such as at most 1×10⁻⁹ M, such as at most 1×10⁻¹⁰ M, such as at most 1×10⁻¹¹ M, such as at most 1×10⁻¹² M. In one embodiment, said albumin is human serum albumin.

[0223] In a second aspect of the present disclosure, there is provided a compound comprising
[0224] at least one moiety (I) which is an albumin binding polypeptide as described in the first aspect;
[0225] one moiety (II) which confers a desired therapeutic activity; and
[0226] optionally, at least one further moiety (III) which confers a desired therapeutic activity, which activity may be the same or different from said activity of moiety (II).

[0227] Thus, the second aspect of the present disclosure provides a compound which comprises as moiety (I) an albumin binding polypeptide as defined in connection with the first aspect. When present as moiety (I) in such a compound, this albumin binding may, in any combination, exhibit any one or more of the properties, features, characteristics and/or embodiments described above in connection with the first aspect of the disclosure. For the sake of brevity, this information will not be repeated in connection with this second aspect, but is incorporated by reference to the above disclosure.

[0228] The compound as defined above comprises at least moieties (I) and (II) and optionally moiety (III). The moieties may for example be connected by covalent coupling using known organic chemistry methods, or, if one or both moieties are polypeptides, be expressed as one or more fusion polypeptides in a system for recombinant expression of polypeptides, or joined in any other fashion, directly or via a linker, for example a linker comprising a number of amino acid residues. For discussions concerning the coupling of albumin binding moieties to other moieties, for example in order to provide a compound as defined above, see for example PCT publications WO2009/016043, WO2012/004384 and WO2014/048977, from which the relevant sections are incorporated herein by reference.

[0229] As defined herein, said compound comprises at least one moiety (I), such as two, three, four or more moieties (I). Similarly to the above, moieties (I) may be coupled to each other by means of chemical conjugation (using known organic chemistry methods) or by any other means, such as expression of said moieties as a fusion protein or joined in any other fashion, either directly or via a linker, for example an amino acid linker. Said moieties (I) may be the same or different.

[0230] The designations moiety (I), moiety (II) and moiety (III) are made for clarity reasons to distinguish between the herein disclosed albumin binding polypeptide (moiety (I)) and moieties exhibiting other functions. These designations are not intended to refer to the actual order of the different domains in the polypeptide chain of the fusion protein or conjugate. Thus, for example, said first moiety may without restriction appear at the N-terminal end, in the middle, or at the C-terminal end of the fusion protein or conjugate. As a non-limiting illustration, moieties (I), (II) and (III) may for example be arranged as (I)-(II)-(I)-(III), (I)-(II)-(I), (I)-(I)-(II), (II)-(III)-(I)-(III), or in any other suitable manner. Thus, said compound may comprise any combination of moieties (I), (II) and optionally (III).

[0231] In one embodiment of this aspect, the part of the compound designated moiety (II) and/or (III) comprises a component selected from the group consisting of human endogenous enzymes, hormones, growth factors, chemokines, cytokines, blood clotting and complement factors, innate immune defense and regulatory peptides, for example selected from the group consisting of insulin, insulin analogs, IL-2, IL-5, GLP-1, BNP, IL 1-RA, KGF, Stemgen®, GH, G-CSF, CTLA-4, myostatin, Factor VII, Factor VIII and Factor IX, and derivatives of anyone thereof.

[0232] In another embodiment, moiety (II) and/or (III) comprises a non-human biologically active protein, selected from the group consisting of modulins, bacterial toxins, hormones, innate immune defense peptides, regulatory peptides, enzymes and activating proteins.

[0233] In yet another embodiment, moiety (II) and/or (III) comprises a binding polypeptide capable of selective interaction with a target molecule. Such a binding polypeptide may for example be selected from the group consisting of antibodies and fragments and domains thereof substantially retaining antibody binding activity; microbodies, maxybodies, avimers and other small disulfide-bonded proteins; and binding proteins derived from a scaffold selected from the group consisting of staphylococcal protein A and domains thereof, other three helix domains, lipocalins, ankyrin repeat domains, cellulose binding domains, γ crystallines, green fluorescent protein, human cytotoxic T lymphocyte-associated antigen 4, protease inhibitors such as Kunitz domains, PDZ domains, SH3 domains, peptide aptamers, staphylococcal nuclease, tendamistats, fibronectin type III domain, transferrin, zinc fingers and conotoxins.

[0234] In some examples of such an embodiment, the binding polypeptide comprises a variant of protein Z, in turn derived from domain B of staphylococcal protein A and described in Nilsson B et al, Protein Engineering 1:107-133, 1987. Such variants, having affinity for a number of different targets, have been selected from libraries and engineered further as described in numerous prior publications, starting with WO95/19374 and the article by Nord et al in Nat Biotech (1997) 15:772-777. In this embodiment of a compound for use according to the present disclosure, the variant of protein Z which corresponds to moiety (II) and/or (III) comprises a scaffold amino acid sequence selected from SEQ ID NO:1775-1781 (see Table 1), wherein X denotes any amino acid residue. As described in the references above, the amino acid positions denoted X are all involved in the binding function of the protein Z variant, and will vary depending on what target the Z variant is designed to bind. Preferably, in these embodiments, the scaffold amino acid sequence of moiety (II) or (III) comprises SEQ ID NO:1775.

TABLE 1
Scaffold amino acid sequences
of protein Z variants

| SEQ | |
|---|---|
| ID NO | Amino acid sequence |
| 1775 | EXXXAXXEIX XLPNLTXXQX XAFIXKLXDD |
| | PSQSSELLSE AKKLNDSQ |
| 1776 | VDNKFNKEXX XAXXEIXXLP NLNXXQXXAF |
| | IXSLXDDPSQ SANLLAEAKK LNDAQAPK |
| 1777 | EXXXAXXEIX XLPNLTXXQX XAFIXKLXDD |
| | PSQSSELLSE AKKLSESQ |
| 1778 | EXXXAXXEIX XLPNLTXXQX XAFIXKLXDD |
| | PSQSSELLSE AKKLESSQ |
| 1779 | EXXXAXXEIX XLPNLTXXQX XAFIXKLXRQ |
| | PEQSSELLSE AKKLNDSQ |
| 1780 | EXXXAXXEIX XLPNLTXXQX XAFIXKLXRQ |
| | PEQSSELLSE AKKLSESQ |
| 1781 | EXXXAXXEIX XLPNLTXXQX XAFIXKLXRQ |
| | PEQSSELLSE AKKLESSQ |

[0235] In embodiments of this aspect, wherein moiety (II) and/or (III) comprises a binding polypeptide capable of selective interaction with a target molecule, said target molecule may be selected from the group consisting of tumor-related or other cell surface related antigens, such as CD14, CD19, CD20, CD22, CD30, CD33, CD37, CD40, CD52, CD56, CD70, CD138, cMet, HER1, HER2, HER3, HER4, CAIX, CEA, IL-2 receptor, IGF1R, VEGFR2, EGFR, FcRn, MUC1, PDGFR-beta, PSMA, TAG-72, FOLR1, mesothelin, CA6, GPNMB, integrins and ephA2; cytokines such as TNF-α, IL-1α, IL-1β, IL-1Ra, IL-5, IL-6, IL-13, IL-17A, IL-18, IL-23, IL-36, G-CSF, GM-CSF, and their receptors; chemokines such as IL-8, CCL-2 and CCL11, and their receptors; complement factors such as C3, C5 and factor D; growth factors such as HGF and myostatin; hormones such as GH, insulin and somatostatin; peptides such as Aβ peptide of Alzheimer's disease; other disease-associated amyloid peptides; hypersensitivity mediators such as histamine and IgE, immunoglobulins such as IgG; blood clotting factors, such as von Willebrand factor; and toxins, such as bacterial toxins and snake venoms.

[0236] In an alternative embodiment, moiety (II) and/or (III) comprises a non-proteinaceous component having a therapeutic activity. Examples of particular interest are cytotoxic agents and anti-inflammatory agents, since albumin has been shown to accumulate in tumor tissues and at sites of inflammation (Kratz and Beyer, Drug Delivery 5: 281-99, 1998; Wunder et al, J. Immunol. 170: 4793-801, 2003). This, in turn, provides a rationale for oral delivery of such compounds together with the albumin binding moiety for targeting and accumulation at relevant tumor tissues or inflammation sites. Non-limiting examples of cytotoxic agents are calicheamycin, auristatin, doxorubicin, maytansinoid, taxane, ecteinascidin, geldanamycin, methotrexate, camptothecin, cyclophosphamide, cyclosporine and their derivatives, and combinations thereof. Non-limiting examples of anti-inflammatory agents are non-steroidal anti-inflammatory drugs (NSAIDs), cytokine suppressive anti-inflammatory drugs (CSAIDs), corticosteroids, methotrexate, prednisone, cyclosporine, morroniside cinnamic acid, leflunomide and their derivatives, and combinations thereof.

[0237] In such embodiments, the non-proteinaceous moiety (II) and/or (III) and albumin binding moiety (I) may be non-covalently associated or covalently coupled together. Conjugation of a non-proteinaceous moiety (II) or (III) to an albumin binding moiety (I) may increase the solubility, and thereby the bioavailability, of poorly soluble compounds otherwise not suitable for oral administration.

[0238] In a third aspect of the present disclosure, there is provided a pharmaceutical composition comprising the compound as described herein and at least one pharmaceutically acceptable excipient.

[0239] Thus, the third aspect of the present disclosure provides a pharmaceutical composition which comprises as one component a compound as defined in connection with the second aspect. When present in a pharmaceutical composition, this compound may, in any combination, exhibit any one or more of the properties, features, characteristics and/or embodiments described above in connection with the second aspect of the disclosure. For the sake of brevity, this information will not be repeated in connection with this third aspect, but is incorporated by reference to the above disclosure.

[0240] The pharmaceutical composition also comprises at least one pharmaceutically acceptable excipient. “Excipients” are inert substances used as diluents or vehicles in a drug formulation. An excipient is mixed with the therapeutically active compound or compounds to facilitate administration or manufacture, improve product delivery, promote the consistent release and bioavailability of the drug, enhance stability, assist in product identification, or enhance other product characteristics. Excipients may be classified into binders, diluents/fillers, lubricants, glidants, disintegrants, polishing agents, colorings, suspending agents, film formers and coatings, plasticizers, dispersing agents, preservatives, flavorings, sweeteners etc.

[0241] In some embodiments of the inventive pharmaceutical composition, it further comprises at least one component for increasing oral bioavailability of the compound which confers a desired therapeutic activity. In those embodiments, the component in question may be selected from the group consisting of protease inhibitors, absorbance enhancers, mucoadhesive polymers, formulation vehicles and any combination thereof. Uses of such components and the scientific rationale behind them are described in the following sections, concerning general strategies to improve the oral bioavailability of therapeutics.

[0242] The resistance of the pharmaceutical composition to the acid and enzymatic environment of the gastrointestinal tract may be (further) increased by adding one or more inhibitors (cocktails or individually targeting) of the relevant peptide- and protein-targeting enzymes active in the stomach (e.g. pepsin) and the intestine (e.g. trypsin, chymotrypsin and carboxypeptidase). Such inhibitors may be selected from trypsin and α-chymotrypsin inhibitors such as pancreatin inhibitor, soybean trypsin inhibitor, FK-448, camostat mesylate, aprotinin, chicken and duck ovomucoids, carboxymethylcellulose and Bowman-Birk inhibitor; or mucoadhesive polymer protease-inhibitor conjugates (Park et al, Reactive and Functional Polymers, 71:280-287, 2011).

[0243] To increase the absorption of polypeptides though the intestinal wall and hence improve the therapeutic efficacy, absorbance enhancers rendering the epithelial barrier more permeable may be included in the pharmaceutical composition. The absorbance enhancers may for instance disrupt the lipid bilayer of the cell membrane improving the transcellular transport, or act as chelating agents rupturing tight junctions facilitating paracellular transport. Non-limiting examples of absorbance enhancers for use in this aspect of the disclosure are detergents, surfactants, bile salts, calcium chelating agents, fatty acids, medium chain glycerides, salicylates, alkanoyl cholines, N-acetylated α-amino acids, N-acetylated non-α-amino acids, chitosans, phospholipids, sodium caprate, acyl carnitine and Zonula Occludens toxin (Park et al, 2011, supra; Salama et al, Adv Drug Deliv Rev. 58:15-28, 2006).

[0244] As an additional or alternative component in the pharmaceutical composition, mucoadhesive polymers have the potential to protect from proteolytic degradation, but are primarily applied to provide site-specific delivery to the mucus membrane, extend the residence time at the site of drug absorption and to improve membrane permeation, all promoting increased absorbance through the intestinal wall. Non-limiting examples for use in the inventive pharmaceutical composition are poly(methacrylic acid-g-ethylene glycol)[P(MAA-g-EG)] hydrogel microparticles, lecithin conjugated alginate microparticles, thiolated polymers (thiomers), gastrointestinal mucoadhesive patch systems (GI-MAPS) and mucoadhesive polymer protease-inhibitor conjugates (Park et al, 2011, supra).

[0245] Formulation vehicles, such as emulsions, liposomes, microspheres, nanospheres, nanocapsules or complete encapsulation, may contribute to the protection from proteolytic degradation and provide a controlled release rate, as well as promoting enhanced delivery across the intestinal wall. Such formulation vehicles constitute yet an alternative or complementary component for use in the inventive pharmaceutical composition. In particular, nanoparticles having modified surface properties or being coupled to a targeting molecule may be used. Surface modification of nanoparticles can for example be achieved either by coating with hydrophilic stabilizing, bioadhesive polymers or surfactants, or by incorporating hydrophilic copolymers in the nanoparticle formulation. Examples of such hydrophilic polymers include PEG and chitosan (des Rieux et al, J Control Release. 116:1-27, 2006). Targeting nanoparticles are designed to specifically adhere to receptors expressed on enterocytes or M-cells of the epithelial layer of the intestinal wall by for instance coupling ligands such as lectins or RGD (arginine-glycine-aspartate) derivatives to the nanoparticle (des Rieux et al, 2006, supra). M-cells also provide a route for delivery into the lymphatic system (Rubas and Grass, Advanced Drug Delivery Reviews, 7:15-69, 1991).

[0246] The pharmaceutical composition defined herein may for example be orally administered in solid form, such as in pills, tablets, capsules, powders or granules; in semi-solid form, such as in pastes; or in liquid form, such as in elixirs, solutions or suspensions. Solid forms may contain excipients such as chitosan, alginates, microcrystalline cellulose, lactose, saccharose, starch, gelatin, milk sugar, polyethylene glycols, polyvinylpyrrolidone (PVP), magnesium stearate, calcium stearate and sodium starch glycolate. Preparations in liquid forms may contain excipients such as sweetening or flavoring agents, emulsifying or suspending agents or diluents such as water, ethanol, propylene glycol and glycerin.

[0247] The formulation may be intended for immediate-, delayed- or controlled-release applications. Tablets or capsules intended for immediate release should rapidly disintegrate and release the entire active substance in the upper part of the GI tract, i.e. the stomach. On the contrary, tablets or capsules intended for delayed or controlled release can be designed for time-dependent release (depot) or site-specific release (e.g. intestine). Time-dependent release may for instance be based on dissolution or diffusion controlled release dependent on the matrix or membrane composition. Site-specific release may for instance be based on pH- or enzyme sensitivity. Particularly preferred for formulation of the pharmaceutical composition according to the third aspect are enteric-coated capsules, intended for release in the small intestine or colon. Such enteric-coated capsules should be stable at the highly acidic pH of the stomach, but be rapidly dissolved at the less acidic pH of the intestinal tract. Examples of pH sensitive enteric film forming agents include cellulose polymers such as hydroxypropyl methyl cellulosephthalate (HPMCP), cellulose acetate phthalate (CAP), cellulose acetate trimellitate (CAT), hydroxypropyl methyl acetatesuccinate (HPMCAS), polyvinyl acetate phthalate (PVAP), and other polymers such as EUDRAGIT derivatives, shellac (SH), chitosan and chitin.

[0248] In a fourth aspect of the disclosure, there is provided an albumin binding polypeptide, a compound or a pharmaceutical composition as defined in the first, second and third aspects respectively, for use in treatment, for example by oral administration.

[0249] In a related fifth aspect, there is provided a method of treatment of a mammalian subject in need of such treatment, comprising administration, for example oral administration, of a therapeutically effective amount of an albumin binding polypeptide, a compound or a pharmaceutical composition as defined in the first, second and third aspects respectively.

[0250] In a related sixth aspect, there is provided use of an albumin binding polypeptide, a compound or a pharmaceutical composition as defined in the first, second and third aspects respectively, for the preparation of a medicament for treatment, for example for treatment by oral administration.

[0251] In the fourth, fifth and sixth aspects, it will be understood that the albumin binding polypeptide, compound and pharmaceutical composition, respectively, may each individually exhibit any one or more of the properties, features, characteristics and/or embodiments described above in connection with the first, second and third aspects of the present disclosure, in any combination. For the sake of brevity, this information will not be repeated here, but is incorporated by reference to the above disclosure.

[0252] In one embodiment, said use or method of treatment is carried out according to a specified dosage regime. The optimal dosage regime will depend on the potency of the moiety conferring the therapeutic effect, on the bioavailability of the compound as defined herein and on the nature of the disease to be treated. However, the compound as defined herein, which comprises an albumin binding moiety that is thought to extend the half-life of the compound, is contemplated to not require a single high dose to reach the level of a therapeutic effect, but, due to the sustained residence time in the circulation, allows for administration of lower repeated doses leading to a build-up of the concentration of the compound, eventually reaching a sustainable desired therapeutic effect. In other words, following oral administration, a lower bioavailability than for a short-lived therapeutic would be acceptable. Such repeated dosing may be given at least twice monthly, once weekly, twice weekly, three times weekly, once daily, twice daily, such as at least three times daily.

[0253] For certain diseases it may be desirable to administer a bolus dose, followed by repeated lower doses. The bolus dose may be taken as multiples of an orally formulated drug, at least once daily, twice daily, three times daily, four times daily or at least five times daily. Alternatively, the high bolus dose may be administered via another route, such as by an intravenous or subcutaneous injection. Subsequent dosing, serving the purpose of providing a sustained therapeutic effect, may be given at least twice monthly, once weekly, twice weekly, three times weekly, once daily, twice daily, three times daily, such as at least four times daily.

[0254] While the present disclosure has been illustrated with reference to various exemplary aspects and embodiments, it will be understood by those skilled in the art that various changes may be made and equivalents may be substituted for elements thereof without departing from the scope of the disclosure. In addition, many modifications may be made to adapt a particular situation or molecule to the teachings of the present disclosure without departing from the essential scope thereof. Therefore, it is intended that the disclosure not be limited to any particular embodiment contemplated, but include all embodiments falling within the scope of the appended claims.

[0255] The present disclosure will now be further illustrated by the following non-limiting Examples.

### BRIEF DESCRIPTION OF THE FIGURES

[0256] FIG. 1A-QQQ is a listing of the amino acid sequences of examples of albumin binding polypeptides of the present disclosure (SEQ ID NO:1-1768 and 1773), control polypeptides (SEQ ID NO:1769-1772 and 1774) and scaffold variants of target binding polypeptides based on protein Z (SEQ ID NO:1775-1781). In the albumin binding polypeptides of the present disclosure, the deduced albumin binding motifs, extending from position 16 to position 45 in each sequence, are enclosed by hyphens. For the avoidance of any doubt, these hyphens do not indicate the presence of deletion mutations.

[0257] FIG. 2 shows a schematic structural model and positions used for intramolecular crosslinking: 1) C₁₇—K₄₅, 2) K₅—C₂₈ and 3) C₁—K₂₉.

[0258] FIG. 3A-B is a diagram showing the result of RP-HPLC analysis of the crude synthetic polypeptide PEP18049. The chromatograms show the absorbance at 220 nm for the linear chloroacetylated PEP18049 before crosslinking (FIG. 3A), and the product after 3 h incubation, where the major peak, indicated by an arrow, contains the intramolecular crosslinked PEP18049_CL (FIG. 3B).

[0259] FIG. 4A-C shows overlays of the CD spectra of test and control polypeptides before (solid line) and after (broken line) heat treatment of A) crosslinked PEP18049_CL; and B) linear reference polypeptide PEP07830, and C) shows normalized variable temperature measurements, VTM, of PEP18049_CL (solid line) and PEP07830 (broken line).

[0260] FIG. 5A shows the result of binding analysis by SPR of human serum albumin binding by the crosslinked PEP18049_CL (black) in comparison with the linear reference polypeptide PEP07830 (grey).

[0261] FIG. 5B shows the result of a binding analysis by SPR of human serum albumin binding by the Cys-Cys crosslinked variants PEP14788_CL_A, PEP14788_CL_B and PEP14788_CL_E (shown in black and indicated by A, B and E, respectively) initially produced by chemical synthesis. Albumin binding by PEP18049_CL (dark grey) and the linear reference polypeptide PEP07830 (light grey) are shown for comparison.

[0262] FIG. 5C shows the result of a binding analysis by SPR of human serum albumin binding by the Cys-Cys crosslinked variants PEP14789_CL_A and PEP14789_CL_B (shown in black and indicated by A and B, respectively) initially produced by recombinant expression in E. coli. PEP18049_CL (dark grey) and the linear reference polypeptide PEP07830 (light grey) are shown for comparison.

[0263] FIG. 6A-B shows the result of the enzyme degradation experiment described in Example 5, using A) pepsin and B) trypsin+chymotrypsin. Normalized amount of residual intact protein of PEP18049_CL (solid line), PEP14788_CL_A (broken line) and PEP07830 (dotted line) is plotted over time.

### EXAMPLE 1

### Production of Polypeptides

[0264] Seven polypeptides were produced by solid phase peptide synthesis (SPPS): PEP18049 (SEQ ID NO:1), PEP18050 (SEQ ID NO:1769), PEP18051 (SEQ ID NO:1770), PEP18052 (SEQ ID NO:1771), PEP18053 (SEQ ID NO:1772), PEP14788 (SEQ ID NO:3) and PEP07830 (SEQ ID NO:1774). The first five were designed to allow for intermolecular crosslinking between a functionalized lysine residue and a partner cysteine as further described in Example 2. PEP14788 was designed as a variant of PEP18049, but with two cysteines for crosslinking with a dihalide and to investigate the possibility to produce the tethered polypeptide using recombinant expression. Hence, this polypeptide, but with an N-terminal GSS, was also produced recombinantly and is here designated PEP14789 (SEQ ID NO:1773). PEP07830 was produced to be used as a linear (non-crosslinked) control in subsequent characterization analyses.

### Materials and Methods

[0265] Production by Chemical Synthesis:

[0266] The polypeptides were synthesized on a 0.1 mmol scale using microwave-assisted SPPS on an automated peptide synthesizer with an integrated microwave oven (Liberty™, CEM Corporation, USA) using an amide resin as solid support (Rink Amide MBHA LL resin (Rink, Tetrahedron Lett 28:3787-3790, 1987), 100-200 mesh (Novabiochem), loading 0.36 mmol⁻¹). N-Methylpyrrolidone (NMP, Carlo Erba Reagent) was used for washing and as main solvent during the synthesis. Acylation reactions were performed using a five-fold excess of the amino acid activated with 2-(1H-benzotriazole-1-yl)-1,1,3,3-tetramethyluronium-hexafluorophosphate (HBTU, Iris Biotech), hydroxybenzotriazole (HOBt, Iris Biotech) and diisopropylethylamine (DIEA, Applied Biosystems), and added to the resin at a molar ratio of 1:1:1:2 (amino acid:HBTU:HOBt:DIEA). All Asn, Arg, Cys, Tyr and Lys (Mtt; 4-methyltrityl) were double coupled due to their bulky protective groups. Potentially unreacted amino groups were capped using acetic anhydride (0.5 M acetic anhydride (AlfaAesar), 0.125 M DIEA and 0.015 M HOBt) before the N-terminal Fmoc group was removed by piperazine treatment (5% piperazine (AlfaAesar) in NMP). All amino acids were introduced with standard side chain protection groups (tert-butyl (tBu) for Asp, Glu, Ser, Thr and Tyr, tert-butyloxycarbonyl (Boc) for Lys, 2,2,4,6,7-pentamethyldihydrobenzofuran-5-sulfonyl (Pbf) for Arg, and trityl (Trt) for Asn and Cys), except where indicated.

[0267] After completed synthesis, the N-terminal leucine of PEP18049 was capped with acetic anhydride (50 mM acetic anhydride (AlfaAesar), 150 mM DIEA and 1.5 mM HOBt). For the other synthetic variants (PEP18050, PEP18051, PEP18052, PEP18053 and PEP14788), the N-terminal leucine or cysteine was introduced as a Boc-protected amino acid, leaving the N-terminal protected until the peptide was cleaved from the resin. The Mtt group on Lys45 (in PEP18049, PEP18052 and PEP18053), Lys5 (in PEP18050 and PEP18052) and/or Lys29 (in PEP18051 and PEP18053) was removed by treatment with TFA/TIS/DCM (1:5:94) (TFA: trifluoroacetic acid (Merck), TIS: triisopropylsilane (Aldrich), DCM: dichloromethane (Applied Biosystems)) for 10×2 min. The free ε-amino group(s) was chloroacetylated by incubation for 1 h with chloroacetic acid (10 eq; Aldrich), preactivated with N,N′-dicyclohexylcarbodiimide (DCC, 5 eq) (Aldrich) and DIEA (10 eq) in DCM, and supplemented with 1 v/v DMF after activation. The chloroacetylation reaction was repeated two or three times.

[0268] Finally, the modified peptide was cleaved from the solid support and the side chains were deprotected by treatment with TFA/EDT/H₂O/TIS (94:2.5:2.5:1) (EDT: 1,2-ethanedithiol (Aldrich)), for 2 h at RT with occasional mixing. After TFA treatment, solid matter was removed by filtration and the peptides were precipitated using ice cold tert-butyl methyl ether (Merck). The precipitates were then centrifuged, the supernatant was removed, and fresh cold ether was added. This was repeated three times before the peptides were dissolved in 20% acetonitrile (Merck) in water with 0.1% TFA and lyophilized.

[0269] The crude peptides were either analyzed by RP-HPLC and LC-ESI-MS or used directly in crosslinking reactions. RP-HPLC was performed using a 4.6×150 mm Zorbax 300SB-C18 column connected to a 1200 series HPLC and LC-ESI-MS was performed on a 6520 Accurate Mass Q-TOF LC/MS (column and instruments from Agilent Technologies).

[0270] Production by Recombinant Expression:

[0271] PEP14789 was cloned and expressed in E. coli with an N-terminal MGSS-extension using standard methods essentially as described in Example 1 of WO2012/004384. Purification was performed by standard chromatography methods using affinity chromatography and reversed phase chromatography, also essentially as described in WO2012/004384.

### Results

[0272] PEP18049, PEP18050, PEP18051, PEP18052, PEP18053, PEP14788 and PEP07830 were successfully produced by solid phase peptide synthesis and PEP14789 was produced by recombinant production. PEP18049, PEP18050, PEP18051, PEP18052 and PEP18053 were further functionalized with a chloroacetyl group at selected lysine residues (one or two at positions 5, 29 or 45). Mass spectrometry analysis confirmed the correct identity of all produced polypeptides.

### EXAMPLE 2

### Intramolecular Crosslinking of Albumin Binding Polypeptides

[0273] The polypeptides to be crosslinked were primarily designed so that a functionalized lysine residue has a partner cysteine that comes in close contact if the protein folds in a three-helical bundle, based on the three-dimensional structure solved for the G148-GA3 domain (PDB file: 1 GJS; Johansson et al, supra). A schematic structural model illustrating crosslinked positions investigated herein is shown in FIG. 2. A polypeptide variant crosslinked between two cysteine residues via a dihalide was also assessed. Amino acid residues used for crosslinking are specified in Table 2.

TABLE 2
Amino acid positions used for crosslinking

| | Designation | |
|---|---|---|
| SEQ ID NO | (crosslinked | |
| (linear polypeptide) | polypeptide) | Crosslinked positions |
| 1 | PEP18049_CL | Cys17-Lys45 |
| 1769 | PEP18050_CL | Lys5-Cys28 |
| 1770 | PEP18051_CL | Cys1-Lys29 |
| 1771 | PEP18052_CL | Lys5-Cys28 and Cys17-Lys45 |
| 1772 | PEP18053_CL | Cys1-Lys29 and Cys17-Lys45 |
| 3 | PEP14788_CL | Cys17-Cys45 |
| 1773 | PEP14789_CL | Cys17-Cys45 |

### Materials and Methods

[0274] Crosslinking Via Lys-Cys:

[0275] For each variant, crude synthetic peptide was dissolved in phosphate-buffered saline (PBS; pH 7.4) supplemented with 10 mM ethylenediaminetetraacetic acid (EDTA; Merck) to a concentration of 2 mg ml⁻¹ and the reaction was allowed to proceed for 3 h or was left over night (approximately 18 h). For small-scale (˜2 mg) cross-linking reactions, the reaction mixture was diluted 1:1 with 0.2% TFA/40% CH₃CN/60% H₂O, filtered and purified by RP-HPLC. For larger scale crosslinking reactions (10-20 mg), the buffer was changed to 25 mM ammonium acetate (Merck) pH 6 using PD-10 columns (GE Healthcare), and the product was lyophilized, dissolved in 0.1% TFA/20% CH₃CN/80% H₂O and purified using semi-preparative RP-HPLC (Zorbax 300SB-C18, 9.4×250 mm, 5 μm particle size, Agilent Technologies) on a 1200 series instrument (Agilent Technologies) and analyzed by LC-ESI-MS.

[0276] Crosslinking Via Cys-Cys:

[0277] The crosslinking of PEP14788 and PEP14789 was performed by mixing the protein sample with a crosslinker pre-dissolved in dimethyl sulfoxide (DMSO, Sigma-Aldrich) in PBS (pH 7.4) supplemented with 10 mM EDTA to a concentration of 3 mg ml⁻¹. The following crosslinkers were used: A: o-xylylene dibromide (Alfa Aesar); B: m-xylylene dibromide (Merck); C: p-xylylene dibromide (Alfa Aesar); D: 2,3-bis(bromomethyl)-quinoxaline (Aldrich); and E: 2,6-bis(bromomethyl)pyridine (Aldrich). The pH was set to 8 by careful addition of 0.1 M NaOH. A 20-fold molar excess of the crosslinker was used to drive the reaction. The reaction was allowed to proceed for 2-3 h before the buffer was exchanged, and the protein lyophilized and purified as described above. After purification, the pure, crosslinked proteins were lyophilized.

### Results

[0278] Crosslinking Via Lys-Cys:

[0279] The crosslinking reaction was performed by dissolving the protein in buffer under conditions where the protein is folded and the thiol group of the cysteine residue can form a nucleophilic attack on the α-carbon of the chloroacetyl group forming a thioether bond:

[chemical structure]

[0280] The crosslinking reaction was very efficient and clean for PEP18049, PEP18050 and PEP18051, which all contain one functionalized lysine. The clean reaction makes it possible to use crude and unpurified polypeptides in the reaction and obtain a pure crosslinked product in relatively high synthetic yield (such as a yield of 10-17% based on the HPLC elution profile at 220 nm). The crosslinking of PEP18052 and PEP18053, which both have two functionalized lysines, proved to be more complex. The expected MW of the double crosslinked protein was found in two separate peaks, which in later analysis showed the same behavior.

[0281] Crosslinking Via Cys-Cys:

[0282] The crosslinking of PEP14788 (which was produced chemically) and PEP14789 (which was produced recombinantly) was performed using a 20-fold excess of crosslinker to drive the reaction. Once one of the thiols has formed a covalent bond to the crosslinker, the second thiol should be in close contact as long as the polypeptide is correctly folded, and rapidly form the second covalent bond to the crosslinker. The reaction was very clean using the crosslinkers A (o-xylylene dibromide), B (m-xylylene dibromide) and E (2,6-bis(bromomethyl)pyridine), and no purification of the synthetic polypeptide was needed before crosslinking. The major by-product was the disulfide crosslinked protein, which could be completely removed by adding a reducing agent to the crosslinking buffer. Reactions using the crosslinkers C (p-xylylene dibromide) and D (2,3-bis(bromomethyl)-quinoxaline) were less efficient and polypeptides including these linkers were not analyzed further. The Cys-Cys crosslinked variants are herein referred to as PEP14788_CL_X and PEP14789_CL_X where X specifies linker A, B or E.

### EXAMPLE 3

### Circular Dicroism Spectroscopy Analysis

[0283] In this Example, circular dicroism (CD) spectroscopy was used to analyze the secondary structure of the chemically synthesized and crosslinked polypeptides produced as described in Example 1 and 2. Additionally, where it was possible, the melting temperatures (Tm) of said polypeptides were determined.

### Materials and Methods

[0284] Polypeptides were dissolved in PBS (pH 7.4) to a concentration of 50 μM (approximately 0.25 mg ml⁻¹) and CD spectra and melting curves were collected on a Jasco J-810 spectropolarimeter (Jasco) using a cell with an optical path-length of 1 mm. Variable temperature measurements, VTM, were used to determine Tm. In these measurements, the absorbance was measured at 221 nm from 20° C. to 90° C., with a temperature slope of 5° C. min⁻¹. The secondary structure of each variant was analyzed by recording a spectrum ranging from 250 to 195 nm at 20° C., both before and after VTM.

### Results

[0285] The CD spectra of PEP18049_CL and the reference protein PEP07830 have local minima at 208 nm and 221 nm, as is typical for alpha helical proteins (FIGS. 4A and 4B). PEP14788_CL_A, PEP14788_CL_B and PEP14788_CL_E also display these typical CD spectra. The four other crosslinked variants did not show these characteristic spectra, indicating that the α-helical secondary structure was partly or completely lost in these molecules.

[0286] VTMs were collected for all polypeptide versions using the CD signal at 221 nm. The melting profiles of PEP18049_CL and the reference protein PEP07830 show a clear transition, indicating a cooperative unfolding of the protein characteristic of a well folded protein (FIG. 4C). The melting temperatures were calculated by determining the midpoint of the transition in the CD versus temperature plot. PEP18049_CL exhibited a Tm of 63° C., corresponding to an increase of approximately 5° C. compared to the Tm of PEP07830, and indicating a more stable protein. The melting profiles of PEP14788_CL_A, PEP14788_CL_B and PEP14788_CL_E showed a lower Tm compared to the reference protein PEP07830 (Table 3). The melting temperatures for the less structured crosslinked variants could not be determined.

TABLE 3
Melting temperatures of crosslinked and reference polypeptides.

| SEQ ID NO | Polypeptide | Tm |
|---|---|---|
| of linear polypeptide | variant | (° C.) |
| 1774 | PEP07830 | 58 |
| 1 | PEP18049_CL | 63 |
| 3 | PEP14788_CL_A | ~55 |
| 3 | PEP14788_CL_B | ~51 |
| 3 | PEP14788_CL_E | ~45 |

### EXAMPLE 4

### Albumin Binding Analysis

[0287] This Example describes the analysis of the albumin binding ability of chemically synthesized, as well as recombinantly expressed, crosslinked polypeptides produced as described in Examples 1 and 2.

### Materials and Methods

[0288] Biosensor binding analyses were performed on a ProteOn XPR36 instrument (Bio-Rad) at 25° C. using PBST (150 mM NaCl, 8 mM Na₂HPO₄, 2 mM NaH₂PO₄, 0.005% Tween20, pH 7.4) as running buffer at a flow rate of 50 μl min⁻¹. An injection of 30 μl of 20 mM HCl at a flow rate of 100 μl min⁻¹ was used for chip regeneration. In a screening experiment, the binding of all polypeptide variants to human serum albumin (HSA) was investigated. The proteins were diluted to 50 nM in running buffer and injected over a chip surface with 2500 RU of immobilized HSA. The association was studied for 300 s and the dissociation was followed for 7200 s (2 h). For data analysis, all samples were double referenced; the signal from a blank surface was first subtracted from the signal from the respective protein, and secondly the signal from an injection of PBST (running buffer) over the HSA surface was subtracted.

[0289] The HSA binding kinetics of PEP18049_CL and the reference protein PEP07830 were further studied using a sensor chip with HSA immobilized on three different surfaces to between 1100 RU and 1600 RU. The proteins were diluted in running buffer (0.8, 1.6, 3.3, and 6.6 nM for PEP18049_CL and 1.0, 2.0, 4.0 and 8.0 nM for PEP07830) and injected over the three HSA surfaces and thus giving binding curves in triplicate. The association time was 300 s and the dissociation was followed for 36 000 s (10 h).

[0290] The kinetic parameters of the binding of PEP18049_CL and the reference protein PEP07830 to HSA were obtained from fitting the obtained sensorgrams to a 1:1 Langmuir binding model using the ProteOn Manager software version 3.1.0.6 (Bio-Rad). The average association rate constant (kₐ (M⁻¹ s⁻¹) and dissociation rate constant (k_{d} (s⁻¹)) with standard deviation were calculated. From the average kₐ and the k_{d} the dissociation equilibrium constant (K_{D} (M)) was calculated (K_{D}=k_{d}/kₐ).

### Results

[0291] HSA binding of the crosslinked polypeptide variants and of the reference protein PEP07830 was analyzed in real time by SPR-based biosensor (ProteOn) experiments. The first screening experiment showed that PEP18049_CL had a fast on-rate and a two phase-like dissociation: a fast and immediate dissociation followed by a much slower dissociation after approximately 30 min (FIG. 5A). PEP18050_CL and PEP18052_CL had completely lost their affinity for HSA, while PEP18053_CL still displayed weak binding. PEP18051_CL showed a slower on-rate, but also seemed to have a very slow off-rate indicating a high affinity for HSA.

[0292] In a second screening experiment, the HSA binding of the chemically synthesized PEP14788_CL_A, PEP14788_CL_B, and PEP14788_CL_E were compared to PEP18049_CL (FIG. 5B). All three Cyc-Cys coupled variants showed similar binding affinities for HSA, comparable to PEP18049_CL.

[0293] In a third screening experiment, the HSA binding of the recombinantly produced PEP14789_CL_A and PEP14789_CL_B were compared to PEP18049_CL (FIG. 5C). These two variants also showed similar binding affinities for HSA, comparable to PEP18049_CL.

[0294] The HSA binding of PEP18049_CL and the reference polypeptide PEP07830 was studied in more detail, but due to extremely slow off-rates it was not possible to use a ProteOn XPR36 for determination of the exact kinetic parameters, including K_{D} values. Thus, the calculated K_{D} values (Table 3) can only be used for comparison in this series of experiments. The biosensor experiments were done in triplicates and demonstrated that crosslinked PEP18049_CL binds HSA with a very high affinity (K_{D}≈24 pM), which affinity does not differ significantly from the affinity of the linear reference polypeptide PEP07830 (K_{D}≈21 pM).

TABLE 4
Relative kinetic parameters for binding of polypeptides to HSA.

| SEQ | | | | |
|---|---|---|---|---|
| ID NO | | | | |
| of linear | | | | |
| poly- | Polypeptide | kₐ | k_{d} | K_{D} |
| peptide | variant | (M⁻¹s⁻¹) | (s⁻¹) | (M) |
| 1 | PEP18049_CL | 6.2(±0.7) × 10⁵ | 1.5(±0.1) × 10⁻⁵ | 24 × 10⁻¹² |
| 1774 | PEP07830 | 1.9(±0.5) × 10⁵ | 4.1(±1.1) × 10⁻⁶ | 21 × 10⁻¹² |

### EXAMPLE 5

### Protease Degradation Analysis

[0295] In this Example, the resistance of tested polypeptides to proteolytic cleavage by pepsin alone and by a combination of trypsin and chymotrypsin was analyzed.

### Materials and Methods

[0296] Proteolytic degradation was studied using pepsin (obtained from porcine gastric mucosa, 3200-4500 U mg⁻¹, Sigma) and a mixture of trypsin (obtained from bovine pancreas, ≈37 U mg⁻¹, Sigma) and chymotrypsin (obtained from bovine pancreas, ≧40 U mg⁻¹, Sigma). In all degradation experiments, 5 μg protein in PBS (pH 7.4) at a concentration of 0.25 mg ml⁻¹ (50 μM) was used.

[0297] Treatment with pepsin: 5 μg of each variant was transferred to a microcentrifuge tube. 32 μl 10 mM HCl with pepsin at a concentration of 3.25 μg ml⁻¹ or 0.81 μg ml⁻¹, resulting in a pH around 2.6 and a final pepsin concentration of 2 μg ml⁻¹ to be used for screening experiment and 0.5 μg ml⁻¹ for studying the degradation over time. In the screening experiment, the samples were incubated for 10 min at 37° C. before the enzyme was inactivated by addition of 5 μl 0.1 M NaOH, which raised the pH to above 9, and then the sample was put on ice. A reference sample of each protein was inactivated with NaOH before pepsin was added to the tube.

[0298] The degradation over time was monitored for PEP18049_CL, PEP14788_CL_A and the reference polypeptide PEP07830 by incubation for 3, 6, 12, 30 or 60 min at 37° C. before inactivation with NaOH. Reference samples, inactivated with NaOH before the pepsin was added to the tube, were incubated likewise.

[0299] Treatment with Trypsin and Chymotrypsin:

[0300] 5 μg of each variant was transferred to a microcentrifuge tube. 32 μl PBS (pH 7.4) with trypsin at a concentration of 4.39 μg ml⁻¹ and chymotrypsin at a concentration of 1.95 μg ml⁻¹ was added to yield a final concentration of 2.7 μg ml⁻¹ of trypsin and 1.2 μg ml⁻¹ of chymotrypsin. In the screening experiment, the samples were incubated for 10 min at 37° C. before the enzyme was inactivated by addition of 3 μl 10% TFA and then the sample was put on ice. A reference sample of each protein was inactivated with TFA before the trypsin and chymotrypsin were added to the tube.

[0301] The degradation over time was monitored for PEP18049_CL, PEP14788_CL_A and the reference polypeptide PEP07830 by incubation for 3, 6, 12, 30, or 60 min at 37° C. before inactivation with TFA. As above, reference samples, inactivated with TFA before trypsin and chymotrypsin were added to the tube, were incubated likewise.

[0302] All samples were analyzed by RP-HPLC using an analytical column (Zorbax 300SB-C18, 4.6×150 mm, 3.5 μm particle size, Agilent Technologies) and a gradient of 15-45% solvent B (solvent A: 0.1% TFA-H₂O; solvent B: 0.1% TFA-CH₃CN) over 25 min at a flow rate of 1.2 ml min⁻¹ and LC-ESI-MS on a 6520 Accurate Mass Q-TOF LC/MS.

[0303] The elution peaks containing the intact polypeptides were integrated and the area under curve was calculated. The degradation experiments over time were performed in triplicates. The integrated area of each sample was normalized to the mean area of the t=0 samples of that variant, the mean and standard error of the mean were calculated for each time point.

[0304] To quantify the stability improvement of the crosslinked variants, the AUC (area under curve) from the normalized charts was calculated for the three investigated variants. The AUC of the crosslinked variants was then compared to the AUC of the reference polypeptide.

### Results

[0305] The first screening experiments clearly demonstrated that PEP18049_CL has an increased resistance towards degradation by both pepsin and the combination of trypsin and chymotrypsin compared to the reference polypeptide. None of the other crosslinked variants showed improved protease stability under the experimental conditions used. In the second screening experiments, the protease stability of PEP14788_CL_A, PEP14788_CL_B, and PEP14788_CL_E was compared. This experiment showed that there was no significant difference between these variants.

[0306] The protease stability of PEP18049_CL, PEP14788_CL_A and the reference polypeptide PEP07830 was studied in further detail and the degradation of the proteins was followed over time. These experiments clearly show that the protease stability of PEP18049_CL compared to the reference protein is significantly improved, in particular the resistance towards degradation by pepsin. A comparison of the area under the curve (AUC) for PEP18049_CL and the reference polypeptide PEP07830 shows that the total amount of full-length protein present during the 60 minutes is at least 17 times (1714%) higher for PEP18049_CL than for PEP07830 when challenged with pepsin and almost 5 (482%) times higher when challenged with trypsin and chymotrypsin (FIG. 6A-B). Also PEP14788_CL_A showed improved stability as compared to PEP07830 as the AUC increased 2.4-fold and 1.4-fold for the pepsin and the combination trypsin and chymotrypsin, respectively.

[0307] Investigation of the major degradation products from pepsin degradation of the reference polypeptide PEP07830 showed that the peptide bond between Leu42 and Ala43 is rapidly cleaved, and that this C-terminally truncated protein is the dominating fragment after three minutes of incubation. This 43-residue fragment is then cleaved between Phe20 and Tyr21 giving rise to two new fragments, which are 21 and 22 amino acids long. When PEP07830 was challenged with the combination of trypsin and chymotrypsin, it was shown that the peptide bond between Tyr21 and Lys22 is the most susceptible for cleavage. In addition to cleavage at this position, several peptide fragments formed by cleavage after arginine or lysine residues could be detected. These degradation patterns are in line with the known fact that pepsin preferentially cleaves at Phe, Tyr, Trp and Leu in position P1 or P1′, while chymotrypsin preferentially cleaves at Trp, Tyr and Phe in position P1 and trypsin at Arg or Lys at position P1.

[0308] To summarize, the crosslinked PEP18049_CL surprisingly showed a dramatic increase in its resistance towards degradation by pepsin (17-fold) and by trypsin together with chymotrypsin (5-fold) compared to the reference polypeptide PEP07830. PEP18049_CL displayed a Tm which was 5° C. higher than that of PEP07830, and an affinity for HSA within the same range, with a K_{D} value in the low picomolar range (24 pM). A variant of PEP18049 with two cysteines crosslinked with a dihalides (PEP14788_CL_A), which allows for recombinant production (as exemplified herein by PEP14789_CL), showed a high affinity for HSA and an improved resistance towards degradation by pepsin (2.4-fold) and by trypsin together with chymotrypsin (1.4-fold) compared to PEP07830.

### Itemized Listing of Embodiments

[0309] 1. Albumin binding polypeptide comprising an albumin binding motif [ABM], which motif consists of the amino acid sequence

(SEQ ID NO. 1782)
GX_{A}SDX₅YKX₈X₉I X₁₁X₁₂AX₁₄TVEGVX₂₀ ALX₂₃X₂₄X₂₅ILX₂₈X₂₉X_{B}

wherein, independently from each other,

[0310] X_{A} is selected from C and K;

[0311] X_{B} is selected from C and K;

[0312] and

[0313] X₅ is selected from F and Y;

[0314] X₈ is selected from D, K, N, R and S;

[0315] X₉ is selected from F, I, L, M, V and Y;

[0316] X₁₁ is selected from D, E, N and S;

[0317] X₁₂ is selected from K, N and R;

[0318] X₁₄ is selected from K and R;

[0319] X₂₀ is selected from D, E, H, K, N, Q, R and S;

[0320] X₂₃ is selected from I, K and T;

[0321] X₂₄ is selected from A, D, E, G, H, L, S and T;

[0322] X₂₅ is selected from A, D, E and H;

[0323] X₂₈ is selected from A and K; and

[0324] X₂₉ is selected from A, E and S.

[0325] 2. Albumin binding polypeptide according to item 1, wherein X_{A} is C.

[0326] 3. Albumin binding polypeptide according to item 1, wherein X_{A} is K.

[0327] 4. Albumin binding polypeptide according to any preceding item, wherein X_{B} is C.

[0328] 5. Albumin binding polypeptide according to any one of items 1-2, wherein X_{B} is K.

[0329] 6. Albumin binding polypeptide according to any one of items 2 and 5, wherein X_{A}X_{B} is CK.

[0330] 7. Albumin binding polypeptide according to any one of items 2 and 4, wherein X_{A}X_{B} is CC.

[0331] 8. Albumin binding polypeptide according to any one of items 3 and 4, wherein X_{A}X_{B} is KC.

[0332] 9. Albumin binding polypeptide according to any one of items 3 and 5, wherein X_{A}X_{B} is KK.

[0333] 10. Albumin binding polypeptide according to any preceding item, wherein X₅ is F.

[0334] 11. Albumin binding polypeptide according to any one of items 1-9, wherein X₅ is Y.

[0335] 12. Albumin binding polypeptide according to any preceding item, wherein X₅ is selected from K, N, R and S.

[0336] 13. Albumin binding polypeptide according to item 12, wherein X₅ is selected from N, R and S.

[0337] 14. Albumin binding polypeptide according to item 12, wherein X₅ is selected from K, N and R.

[0338] 15. Albumin binding polypeptide according to item 13 or 14, wherein X₅ is selected from N and R.

[0339] 16. Albumin binding polypeptide according to item 14, wherein X₅ is selected from K and R.

[0340] 17. Albumin binding polypeptide according to item 15 or 16, wherein X₅ is R.

[0341] 18. Albumin binding polypeptide according to item 15 wherein X₅ is N.

[0342] 19. Albumin binding polypeptide according to item 16, wherein X₅ is K.

[0343] 20. Albumin binding polypeptide according to any preceding item, wherein X₉ is L.

[0344] 21. Albumin binding polypeptide according to any preceding item, wherein X₁₁ is selected from D, E and N.

[0345] 22. Albumin binding polypeptide according to any one of items 1-20, wherein X₁₁ is selected from N and S.

[0346] 23. Albumin binding polypeptide according to item 21 or 22, wherein X₁₁ is N.

[0347] 24. Albumin binding polypeptide according to item 21, wherein X₁₁ is selected from D and E.

[0348] 25. Albumin binding polypeptide according to item 24, wherein X₁₁ is D.

[0349] 26. Albumin binding polypeptide according to item 24, wherein X₁₁ is E.

[0350] 27. Albumin binding polypeptide according to any preceding item, wherein X₁₂ is selected from K and N.

[0351] 28. Albumin binding polypeptide according to any one of items 1-26, wherein X₁₂ is selected from K and R.

[0352] 29. Albumin binding polypeptide according to item 27 or 28, wherein X₁₂ is K.

[0353] 30. Albumin binding polypeptide according to item 27, wherein X₁₂ is N.

[0354] 31. Albumin binding polypeptide according to item 28, wherein X₁₂ is R.

[0355] 32. Albumin binding polypeptide according to any preceding item, wherein X₁₄ is K.

[0356] 33. Albumin binding polypeptide according to any preceding item, wherein X₂₀ is selected from D, E, H, N, Q, R and S.

[0357] 34. Albumin binding polypeptide according to any one of item 1-32, wherein X₂₀ is selected from K and E.

[0358] 35. Albumin binding polypeptide according to item 33 or 34, wherein X₂₀ is E.

[0359] 36. Albumin binding polypeptide according to item 34, wherein X₂₀ is K.

[0360] 37. Albumin binding polypeptide according to any preceding item, wherein X₂₃ is selected from I and K.

[0361] 38. Albumin binding polypeptide according to item 37, wherein X₂₃ is I.

[0362] 39. Albumin binding polypeptide according to item 37, wherein X₂₃ is K.

[0363] 40. Albumin binding polypeptide according to any preceding item, wherein X₂₄ is selected from A, D, G, H, L, S and T.

[0364] 41. Albumin binding polypeptide according to any one of items 1-39, wherein X₂₄ is selected from A, E, G, H, L, S and T.

[0365] 42. Albumin binding polypeptide according to item 40 or 41, wherein X₂₄ is selected from A, G, H, L, S and T.

[0366] 43. Albumin binding polypeptide according to any one of items 1-39, wherein X₂₄ is selected from D, E and L, such as selected from D and E.

[0367] 44. Albumin binding polypeptide according to any one of items 42 and 43, wherein X₂₄ is L.

[0368] 45. Albumin binding polypeptide according to any one of items 40 and 43, wherein X₂₄ is D.

[0369] 46. Albumin binding polypeptide according to any one of items 41 and 43, wherein X₂₄ is E.

[0370] 47. Albumin binding polypeptide according to any preceding item, wherein X₂₅ is selected from A, E and H, such as selected from A and H or selected from A and E.

[0371] 48. Albumin binding polypeptide according to any one of items 1-46, wherein X₂₅ is selected from D, E and H.

[0372] 49. Albumin binding polypeptide according to item 48, wherein X₂₅ is selected from D and E.

[0373] 50. Albumin binding polypeptide according to item 47 or 49, wherein X₂₅ is E.

[0374] 51. Albumin binding polypeptide according to item 47, wherein X₂₅ is A.

[0375] 52. Albumin binding polypeptide according to item 49, wherein X₂₅ is D.

[0376] 53. Albumin binding polypeptide according to item 47 or 48, wherein X₂₅ is H.

[0377] 54. Albumin binding polypeptide according to any preceding item, wherein X₂₈ is A.

[0378] 55. Albumin binding polypeptide according to any preceding item, wherein X₂₉ is selected from A and S.

[0379] 56. Albumin binding polypeptide according to item 55, wherein X₂₉ is A.

[0380] 57. Albumin binding polypeptide according to item 55, wherein X₂₉ is S.

[0381] 58. Albumin binding polypeptide according to any preceding item, wherein said albumin binding motif [ABM] comprises an additional position X₃₁ located on the C-terminal side of the ABM.

[0382] 59. Albumin binding polypeptide according to item 58, wherein X₃₁ is P.

[0383] 60. Albumin binding polypeptide according to any preceding item, in which the [ABM] consists of an amino acid sequence extending from position 16 to position 45 in an amino acid sequence selected from the group consisting of SEQ ID NO:1-1768.

[0384] 61. Albumin binding polypeptide according to item 60, in which the [ABM] consists of an amino acid sequence extending from position 16 to position 45 in an amino acid sequence selected from the group consisting of SEQ ID NO:1-4.

[0385] 62. Albumin binding polypeptide according to item 61, in which the [ABM] consists of an amino acid sequence extending from position 16 to position 45 in an amino acid sequence selected from the group consisting of SEQ ID NO:1 and SEQ ID NO:3.

[0386] 63. Albumin binding polypeptide according to item 62, in which the [ABM] consists of an amino acid sequence extending from position 16 to position 45 in SEQ ID NO:1.

[0387] 64. Albumin binding polypeptide according to any preceding item, in which said albumin binding motif forms part of a three-helix bundle protein domain.

[0388] 65. Albumin binding polypeptide according to item 64, in which said three-helix bundle protein domain is selected from the group consisting of three-helix domains of bacterial receptor proteins.

[0389] 66. Albumin binding polypeptide according to claim 65, in which said bacterial receptor protein is selected from the group consisting of albumin binding receptor proteins from species of Streptococcus, Peptostreptococcus and Finegoldia.

[0390] 67. Albumin binding polypeptide according to claim 66, in which said albumin binding receptor protein is selected from the group consisting of G, MAG, ZAG, PPL and PAB.

[0391] 68. Albumin binding polypeptide according to claim 67, in which said albumin binding receptor protein is protein G.

[0392] 69. Albumin binding polypeptide according to claim 68, in which said albumin binding receptor protein is protein G from Streptococcus strain G148.

[0393] 70. Albumin binding polypeptide according to claim 69, in which said three-helix bundle protein domain is selected from the group consisting of domain GA1, domain GA2 and domain GA3 of protein G from Streptococcus strain G148, in particular domain GA3 of protein G from Streptococcus strain G148.

[0394] 71. Albumin binding polypeptide according to claim 65, in which said bacterial receptor protein is protein A from Staphylococcus aureus.

[0395] 72. Albumin binding polypeptide according to claim 71, in which said three-helix bundle protein domain is selected from the group consisting of protein A domains A, B, C, D and E.

[0396] 73. Albumin binding polypeptide according to claim 71, in which said three-helix bundle protein domain is protein Z derived from domain B of protein A from Staphylococcus aureus.

[0397] 74. Albumin binding polypeptide according to item 64, which comprises the amino acid sequence:

LAXₐAKX_{b}X_{c}AX_{d}XₑELX_{f}X_{g}Y-[ABM] (SEQ ID NO. 1783)

wherein

[0398] [ABM] is an albumin binding motif as defined by any one of items 1-63, and, independently of each other,

[0399] Xₐ is selected from C, E, Q and S;

[0400] X_{b} is selected from C, E, S and V;

[0401] X_{c} is selected from A, D, E, L and S;

[0402] X_{d} is selected from I, N and L;

[0403] Xₑ is selected from A, K, R and S;

[0404] X_{f} is selected from D and K; and

[0405] X_{g} is selected from A, C, K and S.

[0406] 75. Albumin binding polypeptide according to item 74, wherein Xₐ is selected from S and E.

[0407] 76. Albumin binding polypeptide according to item 75, wherein Xₐ is S.

[0408] 77. Albumin binding polypeptide according to item 75, wherein Xₐ is E.

[0409] 78. Albumin binding polypeptide according to any one of items 74-77, wherein X_{b} is selected from C, E and S or alternatively selected from E and V.

[0410] 79. Albumin binding polypeptide according to item 78, wherein X_{b} is E.

[0411] 80. Albumin binding polypeptide according to item 78, wherein X_{b} is V.

[0412] 81. Albumin binding polypeptide according to any one of items 74-80, wherein X_{c} is selected from A and L.

[0413] 82. Albumin binding polypeptide according to any one of items 74-80, wherein X_{c} is selected from A and S.

[0414] 83. Albumin binding polypeptide according to item 81 or 82, wherein X_{c} is A.

[0415] 84. Albumin binding polypeptide according to item 81, wherein X_{c} is L.

[0416] 85. Albumin binding polypeptide according to any one of items 74-84, wherein X_{d} is N.

[0417] 86. Albumin binding polypeptide according to any one of items 74-85, wherein Xₑ is selected from A and R.

[0418] 87. Albumin binding polypeptide according to any one of items 74-85, wherein Xₑ is selected from A and S.

[0419] 88. Albumin binding polypeptide according to item 86 or 87, wherein Xₑ is A.

[0420] 89. Albumin binding polypeptide according to item 86, wherein Xₑ is R.

[0421] 90. Albumin binding polypeptide according to item 87, wherein Xₑ is S.

[0422] 91. Albumin binding polypeptide according to any one of items 74-90, wherein X_{f} is D.

[0423] 92. Albumin binding polypeptide according to any one of items 74-91, wherein X_{g} is selected from C, K and S.

[0424] 93. Albumin binding polypeptide according to item 92, wherein X_{g} is selected from K and S.

[0425] 94. Albumin binding polypeptide according to item 92, wherein X_{g} is selected from C and S.

[0426] 95. Albumin binding polypeptide according to item 93 or 94, wherein X_{g} is S.

[0427] 96. Albumin binding polypeptide according to item 93, wherein X_{g} is K.

[0428] 97. Albumin binding polypeptide according to item 94, wherein X_{g} is C.

[0429] 98. Albumin binding polypeptide according to any one of the preceding items, which comprises an amino acid sequence selected from SEQ ID NO:1-1768.

[0430] 99. Albumin binding polypeptide according to any one of the preceding items, which comprises an amino acid sequence selected from SEQ ID NO:1-4.

[0431] 100. Albumin binding polypeptide according to any one of the preceding items, which comprises an amino acid sequence selected from SEQ ID NO:1 and SEQ ID NO:3.

[0432] 101. Albumin binding polypeptide according to any one of the preceding items, which comprises the amino acid sequence SEQ ID NO:1.

[0433] 102. Albumin binding polypeptide according to any one of items 1-6 and 8-101, wherein said K in position X_{A} or X_{B}, when present, is functionalized.

[0434] 103. Albumin binding polypeptide according to item 102, wherein said functionalized K comprises a haloacetyl group, such as a chloroacetyl group.

[0435] 104. Albumin binding polypeptide according to any preceding item, wherein said amino acid sequence is crosslinked.

[0436] 105. Albumin binding polypeptide according to item 104, wherein said crosslink extends between the amino acid residue in position X_{A} and the amino acid residue in position X_{B} of said amino acid sequence.

[0437] 106. Albumin binding polypeptide according to any one of items 104-105, wherein said crosslink is selected from the group comprising
[0438] thioether bond between a haloacetylated lysine residue and a thiol group of a cysteine residue or thiol-modified lysine residue,
[0439] thioether bond between a maleimide-functionalized lysine residue and a thiol group of a cysteine residue or thiol-modified lysine residue,
[0440] thioether bond between a pyridyldithiol-functionalized lysine residue and a thiol group of a cysteine residue or thiol-modified lysine residue,
[0441] thioether bond between the thiol groups of cysteine residues or thiol-modified lysine residues and a bifunctional dihalogenated linker,
[0442] thioether bond between the thiol groups of cysteine residues or thiol-modified lysine residues and a bifunctional dimaleimide linker,
[0443] thioether bond between the thiol groups of cysteine residues or thiol-modified lysine residues and a bifunctional dipyridyldithiol linker,
[0444] thioether bond between the thiol groups of cysteine residues or thiol-modified lysine residues and a bifunctional perfluoroaromatic linker,
[0445] disulfide bond between the thiol groups of cysteine residues or thiol-modified lysine residues,
[0446] oxime bond between an aminooxy-modified amino acid residue and an aldehyde-modified amino acid residue,
[0447] oxime bond between an aminooxy-modified amino acid residue and a ketone-modified amino acid residue,
[0448] bond formed by Cu-catalyzed cycloaddition between an azido-modified amino acid residue and an alkyne-modified amino acid residue,
[0449] bond formed by Staudinger reaction between an azido-modified amino acid residue and a triarylphosphine-modified amino acid residue, and
[0450] bond formed by native chemical ligation reaction between a thioester-modified amino acid residue and a cysteine-modified amino acid residue.

[0451] 107. Albumin binding polypeptide according to any one of items 104-106, wherein said crosslink is a thioether bond.

[0452] 108. Albumin binding polypeptide according to claim 107, wherein said crosslink is a thioether bond between a haloacetylated lysine residue and the thiol group of a cysteine residue, such as a thioether bond between a chloroacetylated lysine residue and the thiol group of a cysteine residue.

[0453] 109. Albumin binding polypeptide according to any one of items 104-106, wherein said crosslink is a disulfide bond.

[0454] 110. Albumin binding polypeptide according to item 109, wherein said crosslink is a disulfide bond between the thiol groups of two cysteine residues.

[0455] 111. Albumin binding polypeptide according to item 110, wherein said disulfide bond is obtained by using a dihalide crosslinker.

[0456] 112. Albumin binding polypeptide according to item 111, wherein said crosslinker is selected from the group consisting of o-xylylene dibromide, m-xylylene dibromide, p-xylylene dibromide, 2,3-bis(bromomethyl)quinoxaline and 2,6-bis(bromomethyl)pyridine.

[0457] 113. Albumin binding polypeptide according to item 112, wherein said crosslinker is selected from the group consisting of o-xylylene dibromide, m-xylylene dibromide and 2,6-bis(bromomethyl)pyridine.

[0458] 114. Albumin binding polypeptide according to any one of items 104-113, wherein said albumin binding motif retains a two alpha helix conformation.

[0459] 115. Albumin binding polypeptide according to any one of items 104-114, wherein said albumin binding polypeptide retains a three-helix bundle conformation.

[0460] 116. Albumin binding polypeptide according to any one of items 104-115, wherein said polypeptide is resistant to proteolytic cleavage.

[0461] 117. Albumin binding polypeptide according to item 116, wherein said proteolytic cleavage is by at least one protease of the gastrointestinal tract.

[0462] 118. Albumin binding polypeptide according to item 117, wherein said at least one protease is selected from pepsin, trypsin, chymotrypsin and combinations thereof.

[0463] 119. Albumin binding polypeptide according to item 117, wherein said at least one protease is pepsin.

[0464] 120. Albumin binding polypeptide according to item 117, wherein said at least one protease is trypsin.

[0465] 121. Albumin binding polypeptide according to item 117, wherein said at least one protease is chymotrypsin.

[0466] 122. Albumin binding polypeptide according to any one of items 104-121, which exhibits a melting temperature (Tm) of at least 37° C., for example at least 39° C., for example at least 41° C., for example at least 43° C., for example at least 45° C., for example at least 47° C., for example at least 49° C., for example at least 51° C., for example at least 53° C., for example at least 55° C., for example at least 57° C., for example at least 59° C., for example at least 61° C., for example at least 63° C., for example at least 65° C., for example at least 67° C., for example at least 69° C., for example at least 71° C., for example at least 73° C., for example at least 75° C.

[0467] 123. Albumin binding polypeptide according to any preceding item, which binds to albumin such that the K_{D} value of the interaction is at most 1×10⁻⁸ M, such as at most 1×10⁻⁹ M, such as at most 1×10⁻¹⁰ M, such as at most 1×10⁻¹¹ M, such as at most 1×10⁻¹² M.

[0468] 124. Albumin binding polypeptide according to any preceding item, wherein said albumin is human serum albumin.

[0469] 125. Compound comprising:
[0470] at least one moiety (I) which is an albumin binding polypeptide according to any one of the preceding items;
[0471] one moiety (II) which confers a desired therapeutic activity; and
[0472] optionally, at least one further moiety (III) which confers a desired therapeutic activity, which activity may be the same or different from said activity of moiety (II).

[0473] 126. Compound according to item 125, in which moiety (II) and/or at least one further moiety (III) comprise a component selected from the group consisting of human endogenous enzymes, hormones, growth factors, chemokines, cytokines, blood clotting and complement factors, innate immune defense and regulatory peptides, for example selected from the group consisting of insulin, insulin analogs, IL-2, IL-5, GLP-1, BNP, IL 1-RA, KGF, STEMGEN, GH, G-CSF, CTLA-4, myostatin, Factor VII, Factor VIII and Factor IX, and derivatives of anyone thereof.

[0474] 127. Compound according to any one of items 125-126, in which moiety (II) and/or at least one further moiety (III) comprise a non-human biologically active protein, selected from the group consisting of modulins, bacterial toxins, hormones, innate immune defense and regulatory peptides, enzymes and activating proteins.

[0475] 128. Compound according to any one of items 125-127, in which moiety (II) and/or at least one further moiety (III) comprise a binding polypeptide capable of selective interaction with a target molecule.

[0476] 129. Compound according to item 128, in which the binding polypeptide is selected from the group consisting of antibodies and fragments and domains thereof substantially retaining antibody binding activity; microbodies, maxybodies, avimers and other small disulfide-bonded proteins; and binding proteins derived from a scaffold selected from the group consisting of staphylococcal protein A and domains thereof, other three helix domains, lipocalins, ankyrin repeat domains, cellulose binding domains, γ crystallines, green fluorescent protein, human cytotoxic T lymphocyte-associated antigen 4, protease inhibitors such as Kunitz domains, PDZ domains, SH3 domains, peptide aptamers, staphylococcal nuclease, tendamistats, fibronectin type III domain, transferrin, zinc fingers and conotoxins.

[0477] 130. Compound according to item 129, in which said binding polypeptide comprises a variant of protein Z derived from domain B of staphylococcal protein A, which variant comprises a scaffold amino acid sequence selected from SEQ ID NO:1775-1781, wherein X denotes any amino acid residue.

[0478] 131. Compound according to any one of items 128-130, in which said target molecule is selected from the group consisting of tumor-related or other cell surface related antigens, such as CD14, CD19, CD20, CD22, CD30, CD33, CD37, CD40, CD52, CD56, CD70, CD138, cMet, HER1, HER2, HER3, HER4, CAIX, CEA, IL-2 receptor, IGF1R, VEGFR2, FcRn, MUC1, PDGFR-beta, PSMA, TAG-72, FOLR1, mesothelin, CA6, GPNMB, integrins and ephA2; cytokines such as TNF-α, IL-la, IL-1β, IL-1Ra, IL-5, IL-6, IL-13, IL-17A, IL-18, IL-23, IL-36, G-CSF, GM-CSF, and their receptors; chemokines such as IL-8, CCL-2 and CCL11, and their receptors; complement factors such as C3, C5 and factor D; growth factors such as HGF and myostatin; hormones such as GH, insulin and somatostatin; peptides such as Aβ peptide of Alzheimer's disease; other disease-associated amyloid peptides; hypersensitivity mediators such as histamine and IgE, immunoglobulins such as IgG; blood clotting factors, such as von Willebrand factor; and toxins, such as bacterial toxins and snake venoms.

[0479] 132. Compound according to item 125, in which moiety (II) and/or at least one further moiety (III) comprise a non-proteinaceous component selected from the group consisting of a) cytotoxic agents, for example calicheamycin, auristatin, doxorubicin, maytansinoid, taxane, ecteinascidin, geldanamycin, methotrexate, camptothecin, cyclophosphamide, cyclosporine and their derivatives, and combinations thereof; and b) anti-inflammatory agents, for example non-steroidal anti-inflammatory drugs, cytokine suppressive anti-inflammatory drugs, corticosteroids, methotrexate, prednisone, cyclosporine, morroniside cinnamic acid, leflunomide and their derivatives, and combinations thereof.

[0480] 133. Pharmaceutical composition, comprising a compound according to any one of items 125-132 and at least one pharmaceutically acceptable excipient.

[0481] 134. Pharmaceutical composition according to item 133, which further comprises at least one component for increasing oral bioavailability of said therapeutic activity.

[0482] 135. Pharmaceutical composition according to item 134, wherein said component is selected from the group consisting of protease inhibitors, absorbance enhancers, mucoadhesive polymers, formulation vehicles and any combination thereof.

[0483] 136. Pharmaceutical composition according to any one of items 133-135, which is present in a form selected from solid forms, such as pills, tablets, capsules, powders or granules; semi-solid forms, such as pastes; and liquid forms, such as elixirs, solutions or suspensions.

[0484] 137. Pharmaceutical composition according to any one of items 133-136, in a formulation designed for immediate, delayed or controlled release.

[0485] 138. Pharmaceutical composition according to any one of items 133-137, formulated as enteric-coated capsules.

[0486] 139. Albumin binding polypeptide according to any one of items 1-124, compound according to any one of items 125-132 or pharmaceutical composition according to any one of items 133-138 for use in treatment.

[0487] 140. Albumin binding polypeptide, compound or pharmaceutical composition for use according to claim 139, wherein said treatment is via oral administration.

[0488] 141. Albumin binding polypeptide, compound or pharmaceutical composition for use according to any one of claims 139 and 140, wherein said treatment is carried out according to a specified dosage regime.

[0489] 142. Method of treatment of a mammalian subject in need of such treatment, comprising administration of a therapeutically effective amount of an albumin binding polypeptide according to any one of items 1-124, compound according to any one of items 125-132 or pharmaceutical composition according to any one of items 133-138.

[0490] 143. Method according to item 142, wherein said administration is oral administration.

[0491] 144. Method according to any one of items 142-143, wherein said compound or pharmaceutical composition is carried out according to a specified dosage regime.

The application's sequence listing, which the Patent Office published only in electronic form, follows.

SEQUENCE LISTING (1783 sequences)

SEQ ID NO: 1 - protein, 46 aa, ARTIFICIAL SEQUENCE
  Engineered albumin binding polypeptide
LAEAKEAANAELDSYGCSDFYKRLIDKAKTVEGVEALKDAILAAKP

SEQ ID NO: 2 - protein, 46 aa, ARTIFICIAL SEQUENCE
  Engineered albumin binding polypeptide
LAEAKEAANAELDSYGKSDFYKRLIDKAKTVEGVEALKDAILAACP

SEQ ID NO: 3 - protein, 46 aa, ARTIFICIAL SEQUENCE
  Engineered albumin binding polypeptide
LAEAKEAANAELDSYGCSDFYKRLIDKAKTVEGVEALKDAILAACP

SEQ ID NO: 4 - protein, 46 aa, ARTIFICIAL SEQUENCE
  Engineered albumin binding polypeptide
LAEAKEAANAELDSYGKSDFYKRLIDKAKTVEGVEALKDAILAAKP

SEQ ID NO: 5 - protein, 46 aa, ARTIFICIAL SEQUENCE
  Engineered albumin binding polypeptide
LAEAKVLANRELDKYGCSDFYKNLINRAKTVEGVHALIGHILAAKP

SEQ ID NO: 6 - protein, 46 aa, ARTIFICIAL SEQUENCE
  Engineered albumin binding polypeptide
LAEAKVLANRELDKYGKSDFYKNLINRAKTVEGVHALIGHILAACP

SEQ ID NO: 7 - protein, 46 aa, ARTIFICIAL SEQUENCE
  Engineered albumin binding polypeptide
LAEAKVLANRELDKYGCSDFYKNLINRAKTVEGVHALIGHILAACP

SEQ ID NO: 8 - protein, 46 aa, ARTIFICIAL SEQUENCE
  Engineered albumin binding polypeptide
LAEAKVLANRELDKYGKSDFYKNLINRAKTVEGVHALIGHILAAKP

SEQ ID NO: 9 - protein, 46 aa, ARTIFICIAL SEQUENCE
  Engineered albumin binding polypeptide
LAEAKVLANRELDKYGCSDFYKNVINRAKTVEGVHALIDHILAAKP

SEQ ID NO: 10 - protein, 46 aa, ARTIFICIAL SEQUENCE
  Engineered albumin binding polypeptide
LAEAKVLANRELDKYGKSDFYKNVINRAKTVEGVHALIDHILAACP

SEQ ID NO: 11 - protein, 46 aa, ARTIFICIAL SEQUENCE
  Engineered albumin binding polypeptide
LAEAKVLANRELDKYGCSDFYKNVINRAKTVEGVHALIDHILAACP

SEQ ID NO: 12 - protein, 46 aa, ARTIFICIAL SEQUENCE
  Engineered albumin binding polypeptide
LAEAKVLANRELDKYGKSDFYKNVINRAKTVEGVHALIDHILAAKP

SEQ ID NO: 13 - protein, 46 aa, ARTIFICIAL SEQUENCE
  Engineered albumin binding polypeptide
LAEAKVLANRELDKYGCSDYYKNIINRAKTVEGVRALKLHILAAKP

SEQ ID NO: 14 - protein, 46 aa, ARTIFICIAL SEQUENCE
  Engineered albumin binding polypeptide
LAEAKVLANRELDKYGKSDYYKNIINRAKTVEGVRALKLHILAACP

SEQ ID NO: 15 - protein, 46 aa, ARTIFICIAL SEQUENCE
  Engineered albumin binding polypeptide
LAEAKVLANRELDKYGCSDYYKNIINRAKTVEGVRALKLHILAACP

SEQ ID NO: 16 - protein, 46 aa, ARTIFICIAL SEQUENCE
  Engineered albumin binding polypeptide
LAEAKVLANRELDKYGKSDYYKNIINRAKTVEGVRALKLHILAAKP

SEQ ID NO: 17 - protein, 46 aa, ARTIFICIAL SEQUENCE
  Engineered albumin binding polypeptide
LAEAKVLANRELDKYGCSDFYKNVINRAKTVEGVSALIHEILAAKP

SEQ ID NO: 18 - protein, 46 aa, ARTIFICIAL SEQUENCE
  Engineered albumin binding polypeptide
LAEAKVLANRELDKYGKSDFYKNVINRAKTVEGVSALIHEILAACP

SEQ ID NO: 19 - protein, 46 aa, ARTIFICIAL SEQUENCE
  Engineered albumin binding polypeptide
LAEAKVLANRELDKYGCSDFYKNVINRAKTVEGVSALIHEILAACP

SEQ ID NO: 20 - protein, 46 aa, ARTIFICIAL SEQUENCE
  Engineered albumin binding polypeptide
LAEAKVLANRELDKYGKSDFYKNVINRAKTVEGVSALIHEILAAKP

SEQ ID NO: 21 - protein, 46 aa, ARTIFICIAL SEQUENCE
  Engineered albumin binding polypeptide
LAEAKVLANRELDKYGCSDFYKRLINRAKTVEGVNTLIADILAAKP

SEQ ID NO: 22 - protein, 46 aa, ARTIFICIAL SEQUENCE
  Engineered albumin binding polypeptide
LAEAKVLANRELDKYGKSDFYKRLINRAKTVEGVNTLIADILAACP

SEQ ID NO: 23 - protein, 46 aa, ARTIFICIAL SEQUENCE
  Engineered albumin binding polypeptide
LAEAKVLANRELDKYGCSDFYKRLINRAKTVEGVNTLIADILAACP

SEQ ID NO: 24 - protein, 46 aa, ARTIFICIAL SEQUENCE
  Engineered albumin binding polypeptide
LAEAKVLANRELDKYGKSDFYKRLINRAKTVEGVNTLIADILAAKP

SEQ ID NO: 25 - protein, 46 aa, ARTIFICIAL SEQUENCE
  Engineered albumin binding polypeptide
LAEAKVLANRELDKYGCSDFYKNLINRAKTVEGVNTLIADILAAKP

SEQ ID NO: 26 - protein, 46 aa, ARTIFICIAL SEQUENCE
  Engineered albumin binding polypeptide
LAEAKVLANRELDKYGKSDFYKNLINRAKTVEGVNTLIADILAACP

SEQ ID NO: 27 - protein, 46 aa, ARTIFICIAL SEQUENCE
  Engineered albumin binding polypeptide
LAEAKVLANRELDKYGCSDFYKNLINRAKTVEGVNTLIADILAACP

SEQ ID NO: 28 - protein, 46 aa, ARTIFICIAL SEQUENCE
  Engineered albumin binding polypeptide
LAEAKVLANRELDKYGKSDFYKNLINRAKTVEGVNTLIADILAAKP

SEQ ID NO: 29 - protein, 46 aa, ARTIFICIAL SEQUENCE
  Engineered albumin binding polypeptide
LAEAKVLANRELDKYGCSDYYKNLINRAKTVEGVNSLISHILAAKP

SEQ ID NO: 30 - protein, 46 aa, ARTIFICIAL SEQUENCE
  Engineered albumin binding polypeptide
LAEAKVLANRELDKYGKSDYYKNLINRAKTVEGVNSLISHILAACP

SEQ ID NO: 31 - protein, 46 aa, ARTIFICIAL SEQUENCE
  Engineered albumin binding polypeptide
LAEAKVLANRELDKYGCSDYYKNLINRAKTVEGVNSLISHILAACP

SEQ ID NO: 32 - protein, 46 aa, ARTIFICIAL SEQUENCE
  Engineered albumin binding polypeptide
LAEAKVLANRELDKYGKSDYYKNLINRAKTVEGVNSLISHILAAKP

SEQ ID NO: 33 - protein, 46 aa, ARTIFICIAL SEQUENCE
  Engineered albumin binding polypeptide
LAEAKVLANRELDKYGCSDFYKRLINRAKTVGGVQSLISEILAAKP

SEQ ID NO: 34 - protein, 46 aa, ARTIFICIAL SEQUENCE
  Engineered albumin binding polypeptide
LAEAKVLANRELDKYGKSDFYKRLINRAKTVGGVQSLISEILAACP

SEQ ID NO: 35 - protein, 46 aa, ARTIFICIAL SEQUENCE
  Engineered albumin binding polypeptide
LAEAKVLANRELDKYGCSDFYKRLINRAKTVGGVQSLISEILAACP

SEQ ID NO: 36 - protein, 46 aa, ARTIFICIAL SEQUENCE
  Engineered albumin binding polypeptide
LAEAKVLANRELDKYGKSDFYKRLINRAKTVGGVQSLISEILAAKP

SEQ ID NO: 37 - protein, 46 aa, ARTIFICIAL SEQUENCE
  Engineered albumin binding polypeptide
LAEAKVLANRELDKYGCSDFYKNLINRAKTVEGVSSLKGHILAAKP

SEQ ID NO: 38 - protein, 46 aa, ARTIFICIAL SEQUENCE
  Engineered albumin binding polypeptide
LAEAKVLANRELDKYGKSDFYKNLINRAKTVEGVSSLKGHILAACP

SEQ ID NO: 39 - protein, 46 aa, ARTIFICIAL SEQUENCE
  Engineered albumin binding polypeptide
LAEAKVLANRELDKYGCSDFYKNLINRAKTVEGVSSLKGHILAACP

SEQ ID NO: 40 - protein, 46 aa, ARTIFICIAL SEQUENCE
  Engineered albumin binding polypeptide
LAEAKVLANRELDKYGKSDFYKNLINRAKTVEGVSSLKGHILAAKP

SEQ ID NO: 41 - protein, 46 aa, ARTIFICIAL SEQUENCE
  Engineered albumin binding polypeptide
LAEAKVLANRELDKYGCSDFYKNVINRAKTVEGVDSLIAEILAAKP

SEQ ID NO: 42 - protein, 46 aa, ARTIFICIAL SEQUENCE
  Engineered albumin binding polypeptide
LAEAKVLANRELDKYGKSDFYKNVINRAKTVEGVDSLIAEILAACP

SEQ ID NO: 43 - protein, 46 aa, ARTIFICIAL SEQUENCE
  Engineered albumin binding polypeptide
LAEAKVLANRELDKYGCSDFYKNVINRAKTVEGVDSLIAEILAACP

SEQ ID NO: 44 - protein, 46 aa, ARTIFICIAL SEQUENCE
  Engineered albumin binding polypeptide
LAEAKVLANRELDKYGKSDFYKNVINRAKTVEGVDSLIAEILAAKP

SEQ ID NO: 45 - protein, 46 aa, ARTIFICIAL SEQUENCE
  Engineered albumin binding polypeptide
LAEAKVLANRELDKYGCSDFYKNLINRARTVEGVQTLISDILAAKP

SEQ ID NO: 46 - protein, 46 aa, ARTIFICIAL SEQUENCE
  Engineered albumin binding polypeptide
LAEAKVLANRELDKYGKSDFYKNLINRARTVEGVQTLISDILAACP

SEQ ID NO: 47 - protein, 46 aa, ARTIFICIAL SEQUENCE
  Engineered albumin binding polypeptide
LAEAKVLANRELDKYGCSDFYKNLINRARTVEGVQTLISDILAACP

SEQ ID NO: 48 - protein, 46 aa, ARTIFICIAL SEQUENCE
  Engineered albumin binding polypeptide
LAEAKVLANRELDKYGKSDFYKNLINRARTVEGVQTLISDILAAKP

SEQ ID NO: 49 - protein, 46 aa, ARTIFICIAL SEQUENCE
  Engineered albumin binding polypeptide
LAEAKVLANRELDKYGCSDFYKKFINKAKTVEGVETLISEILAAKP

SEQ ID NO: 50 - protein, 46 aa, ARTIFICIAL SEQUENCE
  Engineered albumin binding polypeptide
LAEAKVLANRELDKYGKSDFYKKFINKAKTVEGVETLISEILAACP

SEQ ID NO: 51 - protein, 46 aa, ARTIFICIAL SEQUENCE
  Engineered albumin binding polypeptide
LAEAKVLANRELDKYGCSDFYKKFINKAKTVEGVETLISEILAACP

SEQ ID NO: 52 - protein, 46 aa, ARTIFICIAL SEQUENCE
  Engineered albumin binding polypeptide
LAEAKVLANRELDKYGKSDFYKKFINKAKTVEGVETLISEILAAKP

SEQ ID NO: 53 - protein, 46 aa, ARTIFICIAL SEQUENCE
  Engineered albumin binding polypeptide
LAEAKVLANRELDKYGCSDFYKSLINRAKTVEGVHSLTDEILAAKP

SEQ ID NO: 54 - protein, 46 aa, ARTIFICIAL SEQUENCE
  Engineered albumin binding polypeptide
LAEAKVLANRELDKYGKSDFYKSLINRAKTVEGVHSLTDEILAACP

SEQ ID NO: 55 - protein, 46 aa, ARTIFICIAL SEQUENCE
  Engineered albumin binding polypeptide
LAEAKVLANRELDKYGCSDFYKSLINRAKTVEGVHSLTDEILAACP

SEQ ID NO: 56 - protein, 46 aa, ARTIFICIAL SEQUENCE
  Engineered albumin binding polypeptide
LAEAKVLANRELDKYGKSDFYKSLINRAKTVEGVHSLTDEILAAKP

SEQ ID NO: 57 - protein, 46 aa, ARTIFICIAL SEQUENCE
  Engineered albumin binding polypeptide
LAEAKVLANRELDKYGCSDYYKNVINKAKTVEGVSSLTAEILAAKP

SEQ ID NO: 58 - protein, 46 aa, ARTIFICIAL SEQUENCE
  Engineered albumin binding polypeptide
LAEAKVLANRELDKYGKSDYYKNVINKAKTVEGVSSLTAEILAACP

SEQ ID NO: 59 - protein, 46 aa, ARTIFICIAL SEQUENCE
  Engineered albumin binding polypeptide
LAEAKVLANRELDKYGCSDYYKNVINKAKTVEGVSSLTAEILAACP

SEQ ID NO: 60 - protein, 46 aa, ARTIFICIAL SEQUENCE
  Engineered albumin binding polypeptide
LAEAKVLANRELDKYGKSDYYKNVINKAKTVEGVSSLTAEILAAKP

SEQ ID NO: 61 - protein, 46 aa, ARTIFICIAL SEQUENCE
  Engineered albumin binding polypeptide
LAEAKVLANRELDKYGCSDFYKSLINRAKTVEGVDALTSHILAAKP

SEQ ID NO: 62 - protein, 46 aa, ARTIFICIAL SEQUENCE
  Engineered albumin binding polypeptide
LAEAKVLANRELDKYGKSDFYKSLINRAKTVEGVDALTSHILAACP

SEQ ID NO: 63 - protein, 46 aa, ARTIFICIAL SEQUENCE
  Engineered albumin binding polypeptide
LAEAKVLANRELDKYGCSDFYKSLINRAKTVEGVDALTSHILAACP

SEQ ID NO: 64 - protein, 46 aa, ARTIFICIAL SEQUENCE
  Engineered albumin binding polypeptide
LAEAKVLANRELDKYGKSDFYKSLINRAKTVEGVDALTSHILAAKP

SEQ ID NO: 65 - protein, 46 aa, ARTIFICIAL SEQUENCE
  Engineered albumin binding polypeptide
LAEAKVLANRELDKYGCSDFYKNLINKAKTVEGVSTLIHDILAAKP

SEQ ID NO: 66 - protein, 46 aa, ARTIFICIAL SEQUENCE
  Engineered albumin binding polypeptide
LAEAKVLANRELDKYGKSDFYKNLINKAKTVEGVSTLIHDILAACP

SEQ ID NO: 67 - protein, 46 aa, ARTIFICIAL SEQUENCE
  Engineered albumin binding polypeptide
LAEAKVLANRELDKYGCSDFYKNLINKAKTVEGVSTLIHDILAACP

SEQ ID NO: 68 - protein, 46 aa, ARTIFICIAL SEQUENCE
  Engineered albumin binding polypeptide
LAEAKVLANRELDKYGKSDFYKNLINKAKTVEGVSTLIHDILAAKP

SEQ ID NO: 69 - protein, 46 aa, ARTIFICIAL SEQUENCE
  Engineered albumin binding polypeptide
LAEAKVLANRELDKYGCSDFYKNLINRAKTVEGVSTLIHDILAAKP

SEQ ID NO: 70 - protein, 46 aa, ARTIFICIAL SEQUENCE
  Engineered albumin binding polypeptide
LAEAKVLANRELDKYGKSDFYKNLINRAKTVEGVSTLIHDILAACP

SEQ ID NO: 71 - protein, 46 aa, ARTIFICIAL SEQUENCE
  Engineered albumin binding polypeptide
LAEAKVLANRELDKYGCSDFYKNLINRAKTVEGVSTLIHDILAACP

SEQ ID NO: 72 - protein, 46 aa, ARTIFICIAL SEQUENCE
  Engineered albumin binding polypeptide
LAEAKVLANRELDKYGKSDFYKNLINRAKTVEGVSTLIHDILAAKP

SEQ ID NO: 73 - protein, 46 aa, ARTIFICIAL SEQUENCE
  Engineered albumin binding polypeptide
LAEAKVLANRELDKYGCSDFYKNLINRAKTVEGVQALISEILAAKP

SEQ ID NO: 74 - protein, 46 aa, ARTIFICIAL SEQUENCE
  Engineered albumin binding polypeptide
LAEAKVLANRELDKYGKSDFYKNLINRAKTVEGVQALISEILAACP

SEQ ID NO: 75 - protein, 46 aa, ARTIFICIAL SEQUENCE
  Engineered albumin binding polypeptide
LAEAKVLANRELDKYGCSDFYKNLINRAKTVEGVQALISEILAACP

SEQ ID NO: 76 - protein, 46 aa, ARTIFICIAL SEQUENCE
  Engineered albumin binding polypeptide
LAEAKVLANRELDKYGKSDFYKNLINRAKTVEGVQALISEILAAKP

SEQ ID NO: 77 - protein, 46 aa, ARTIFICIAL SEQUENCE
  Engineered albumin binding polypeptide
LAEAKVLANRELDKYGCSDYYKSLINKAKTVEGVDSLIVHILAAKP

SEQ ID NO: 78 - protein, 46 aa, ARTIFICIAL SEQUENCE
  Engineered albumin binding polypeptide
LAEAKVLANRELDKYGKSDYYKSLINKAKTVEGVDSLIVHILAACP

SEQ ID NO: 79 - protein, 46 aa, ARTIFICIAL SEQUENCE
  Engineered albumin binding polypeptide
LAEAKVLANRELDKYGCSDYYKSLINKAKTVEGVDSLIVHILAACP

SEQ ID NO: 80 - protein, 46 aa, ARTIFICIAL SEQUENCE
  Engineered albumin binding polypeptide
LAEAKVLANRELDKYGKSDYYKSLINKAKTVEGVDSLIVHILAAKP

SEQ ID NO: 81 - protein, 46 aa, ARTIFICIAL SEQUENCE
  Engineered albumin binding polypeptide
LAEAKVLANRELDKYGCSDFYKNLINRAKTVEGVQSLITEILAAKP

SEQ ID NO: 82 - protein, 46 aa, ARTIFICIAL SEQUENCE
  Engineered albumin binding polypeptide
LAEAKVLANRELDKYGKSDFYKNLINRAKTVEGVQSLITEILAACP

SEQ ID NO: 83 - protein, 46 aa, ARTIFICIAL SEQUENCE
  Engineered albumin binding polypeptide
LAEAKVLANRELDKYGCSDFYKNLINRAKTVEGVQSLITEILAACP

SEQ ID NO: 84 - protein, 46 aa, ARTIFICIAL SEQUENCE
  Engineered albumin binding polypeptide
LAEAKVLANRELDKYGKSDFYKNLINRAKTVEGVQSLITEILAAKP

SEQ ID NO: 85 - protein, 46 aa, ARTIFICIAL SEQUENCE
  Engineered albumin binding polypeptide
LAEAKVLANRELDKYGCSDYYKNLINRAKTVEGVDALITHILAAKP

SEQ ID NO: 86 - protein, 46 aa, ARTIFICIAL SEQUENCE
  Engineered albumin binding polypeptide
LAEAKVLANRELDKYGKSDYYKNLINRAKTVEGVDALITHILAACP

SEQ ID NO: 87 - protein, 46 aa, ARTIFICIAL SEQUENCE
  Engineered albumin binding polypeptide
LAEAKVLANRELDKYGCSDYYKNLINRAKTVEGVDALITHILAACP

SEQ ID NO: 88 - protein, 46 aa, ARTIFICIAL SEQUENCE
  Engineered albumin binding polypeptide
LAEAKVLANRELDKYGKSDYYKNLINRAKTVEGVDALITHILAAKP

SEQ ID NO: 89 - protein, 46 aa, ARTIFICIAL SEQUENCE
  Engineered albumin binding polypeptide
LAEAKVLANRELDKYGCSDFYKSMINRAKTVEGVDSLITHILAAKP

SEQ ID NO: 90 - protein, 46 aa, ARTIFICIAL SEQUENCE
  Engineered albumin binding polypeptide
LAEAKVLANRELDKYGKSDFYKSMINRAKTVEGVDSLITHILAACP

SEQ ID NO: 91 - protein, 46 aa, ARTIFICIAL SEQUENCE
  Engineered albumin binding polypeptide
LAEAKVLANRELDKYGCSDFYKSMINRAKTVEGVDSLITHILAACP

SEQ ID NO: 92 - protein, 46 aa, ARTIFICIAL SEQUENCE
  Engineered albumin binding polypeptide
LAEAKVLANRELDKYGKSDFYKSMINRAKTVEGVDSLITHILAAKP

SEQ ID NO: 93 - protein, 46 aa, ARTIFICIAL SEQUENCE
  Engineered albumin binding polypeptide
LAEAKVLANRELDKYGCSDFYKNLINRAKTVEGVTTLTTDILAAKP

SEQ ID NO: 94 - protein, 46 aa, ARTIFICIAL SEQUENCE
  Engineered albumin binding polypeptide
LAEAKVLANRELDKYGKSDFYKNLINRAKTVEGVTTLTTDILAACP

SEQ ID NO: 95 - protein, 46 aa, ARTIFICIAL SEQUENCE
  Engineered albumin binding polypeptide
LAEAKVLANRELDKYGCSDFYKNLINRAKTVEGVTTLTTDILAACP

SEQ ID NO: 96 - protein, 46 aa, ARTIFICIAL SEQUENCE
  Engineered albumin binding polypeptide
LAEAKVLANRELDKYGKSDFYKNLINRAKTVEGVTTLTTDILAAKP

SEQ ID NO: 97 - protein, 46 aa, ARTIFICIAL SEQUENCE
  Engineered albumin binding polypeptide
LAEAKVLANRELDKYGCSDFYKNLINRAKTVEGVESLIDHILAAKP

SEQ ID NO: 98 - protein, 46 aa, ARTIFICIAL SEQUENCE
  Engineered albumin binding polypeptide
LAEAKVLANRELDKYGKSDFYKNLINRAKTVEGVESLIDHILAACP

SEQ ID NO: 99 - protein, 46 aa, ARTIFICIAL SEQUENCE
  Engineered albumin binding polypeptide
LAEAKVLANRELDKYGCSDFYKNLINRAKTVEGVESLIDHILAACP

SEQ ID NO: 100 - protein, 46 aa, ARTIFICIAL SEQUENCE
  Engineered albumin binding polypeptide
LAEAKVLANRELDKYGKSDFYKNLINRAKTVEGVESLIDHILAAKP

SEQ ID NO: 101 - protein, 46 aa, ARTIFICIAL SEQUENCE
  Engineered albumin binding polypeptide
LAEAKVLANRELDKYGCSDFYKSYINRAKTVEGVHTLIGHILAAKP

SEQ ID NO: 102 - protein, 46 aa, ARTIFICIAL SEQUENCE
  Engineered albumin binding polypeptide
LAEAKVLANRELDKYGKSDFYKSYINRAKTVEGVHTLIGHILAACP

SEQ ID NO: 103 - protein, 46 aa, ARTIFICIAL SEQUENCE
  Engineered albumin binding polypeptide
LAEAKVLANRELDKYGCSDFYKSYINRAKTVEGVHTLIGHILAACP

SEQ ID NO: 104 - protein, 46 aa, ARTIFICIAL SEQUENCE
  Engineered albumin binding polypeptide
LAEAKVLANRELDKYGKSDFYKSYINRAKTVEGVHTLIGHILAAKP

SEQ ID NO: 105 - protein, 46 aa, ARTIFICIAL SEQUENCE
  Engineered albumin binding polypeptide
LAEAKVLANRELDKYGCSDFYKNLINRAKTVEGVQTLISDILAAKP

SEQ ID NO: 106 - protein, 46 aa, ARTIFICIAL SEQUENCE
  Engineered albumin binding polypeptide
LAEAKVLANRELDKYGKSDFYKNLINRAKTVEGVQTLISDILAACP

SEQ ID NO: 107 - protein, 46 aa, ARTIFICIAL SEQUENCE
  Engineered albumin binding polypeptide
LAEAKVLANRELDKYGCSDFYKNLINRAKTVEGVQTLISDILAACP

SEQ ID NO: 108 - protein, 46 aa, ARTIFICIAL SEQUENCE
  Engineered albumin binding polypeptide
LAEAKVLANRELDKYGKSDFYKNLINRAKTVEGVQTLISDILAAKP

SEQ ID NO: 109 - protein, 46 aa, ARTIFICIAL SEQUENCE
  Engineered albumin binding polypeptide
LAEAKVLANRELDKYGCSDFYKNLINRAKTVEGVNSLTSHILAAKP

SEQ ID NO: 110 - protein, 46 aa, ARTIFICIAL SEQUENCE
  Engineered albumin binding polypeptide
LAEAKVLANRELDKYGKSDFYKNLINRAKTVEGVNSLTSHILAACP

SEQ ID NO: 111 - protein, 46 aa, ARTIFICIAL SEQUENCE
  Engineered albumin binding polypeptide
LAEAKVLANRELDKYGCSDFYKNLINRAKTVEGVNSLTSHILAACP

SEQ ID NO: 112 - protein, 46 aa, ARTIFICIAL SEQUENCE
  Engineered albumin binding polypeptide
LAEAKVLANRELDKYGKSDFYKNLINRAKTVEGVNSLTSHILAAKP

SEQ ID NO: 113 - protein, 46 aa, ARTIFICIAL SEQUENCE
  Engineered albumin binding polypeptide
LAEAKVLANRELDKYGCSDFYKNLINRAKTVEGVNTLIHDILAAKP

SEQ ID NO: 114 - protein, 46 aa, ARTIFICIAL SEQUENCE
  Engineered albumin binding polypeptide
LAEAKVLANRELDKYGKSDFYKNLINRAKTVEGVNTLIHDILAACP

SEQ ID NO: 115 - protein, 46 aa, ARTIFICIAL SEQUENCE
  Engineered albumin binding polypeptide
LAEAKVLANRELDKYGCSDFYKNLINRAKTVEGVNTLIHDILAACP

SEQ ID NO: 116 - protein, 46 aa, ARTIFICIAL SEQUENCE
  Engineered albumin binding polypeptide
LAEAKVLANRELDKYGKSDFYKNLINRAKTVEGVNTLIHDILAAKP

SEQ ID NO: 117 - protein, 46 aa, ARTIFICIAL SEQUENCE
  Engineered albumin binding polypeptide
LAEAKVLANRELDKYGCSDFYKNLINRAKTVEGVESLIGEILAAKP

SEQ ID NO: 118 - protein, 46 aa, ARTIFICIAL SEQUENCE
  Engineered albumin binding polypeptide
LAEAKVLANRELDKYGKSDFYKNLINRAKTVEGVESLIGEILAACP

SEQ ID NO: 119 - protein, 46 aa, ARTIFICIAL SEQUENCE
  Engineered albumin binding polypeptide
LAEAKVLANRELDKYGCSDFYKNLINRAKTVEGVESLIGEILAACP

SEQ ID NO: 120 - protein, 46 aa, ARTIFICIAL SEQUENCE
  Engineered albumin binding polypeptide
LAEAKVLANRELDKYGKSDFYKNLINRAKTVEGVESLIGEILAAKP

SEQ ID NO: 121 - protein, 46 aa, ARTIFICIAL SEQUENCE
  Engineered albumin binding polypeptide
LAEAKVLANRELDKYGCSDFYKNLINKAKTVEGVHTLIHDILAAKP

SEQ ID NO: 122 - protein, 46 aa, ARTIFICIAL SEQUENCE
  Engineered albumin binding polypeptide
LAEAKVLANRELDKYGKSDFYKNLINKAKTVEGVHTLIHDILAACP

SEQ ID NO: 123 - protein, 46 aa, ARTIFICIAL SEQUENCE
  Engineered albumin binding polypeptide
LAEAKVLANRELDKYGCSDFYKNLINKAKTVEGVHTLIHDILAACP

SEQ ID NO: 124 - protein, 46 aa, ARTIFICIAL SEQUENCE
  Engineered albumin binding polypeptide
LAEAKVLANRELDKYGKSDFYKNLINKAKTVEGVHTLIHDILAAKP

SEQ ID NO: 125 - protein, 46 aa, ARTIFICIAL SEQUENCE
  Engineered albumin binding polypeptide
LAEAKVLANRELDKYGCSDYYKNLINKAKTVEGVSALKMHILAAKP

SEQ ID NO: 126 - protein, 46 aa, ARTIFICIAL SEQUENCE
  Engineered albumin binding polypeptide
LAEAKVLANRELDKYGKSDYYKNLINKAKTVEGVSALKMHILAACP

SEQ ID NO: 127 - protein, 46 aa, ARTIFICIAL SEQUENCE
  Engineered albumin binding polypeptide
LAEAKVLANRELDKYGCSDYYKNLINKAKTVEGVSALKMHILAACP

SEQ ID NO: 128 - protein, 46 aa, ARTIFICIAL SEQUENCE
  Engineered albumin binding polypeptide
LAEAKVLANRELDKYGKSDYYKNLINKAKTVEGVSALKMHILAAKP

SEQ ID NO: 129 - protein, 46 aa, ARTIFICIAL SEQUENCE
  Engineered albumin binding polypeptide
LAEAKVLANRELDKYGCSDFYKNLINKAKTVEGVDALIVHILAAKP

SEQ ID NO: 130 - protein, 46 aa, ARTIFICIAL SEQUENCE
  Engineered albumin binding polypeptide
LAEAKVLANRELDKYGKSDFYKNLINKAKTVEGVDALIVHILAACP

SEQ ID NO: 131 - protein, 46 aa, ARTIFICIAL SEQUENCE
  Engineered albumin binding polypeptide
LAEAKVLANRELDKYGCSDFYKNLINKAKTVEGVDALIVHILAACP

SEQ ID NO: 132 - protein, 46 aa, ARTIFICIAL SEQUENCE
  Engineered albumin binding polypeptide
LAEAKVLANRELDKYGKSDFYKNLINKAKTVEGVDALIVHILAAKP

SEQ ID NO: 133 - protein, 46 aa, ARTIFICIAL SEQUENCE
  Engineered albumin binding polypeptide
LAEAKVLANRELDKYGCSDYYKRLINRAKTVEGVHALIAEILAAKP

SEQ ID NO: 134 - protein, 46 aa, ARTIFICIAL SEQUENCE
  Engineered albumin binding polypeptide
LAEAKVLANRELDKYGKSDYYKRLINRAKTVEGVHALIAEILAACP

SEQ ID NO: 135 - protein, 46 aa, ARTIFICIAL SEQUENCE
  Engineered albumin binding polypeptide
LAEAKVLANRELDKYGCSDYYKRLINRAKTVEGVHALIAEILAACP

SEQ ID NO: 136 - protein, 46 aa, ARTIFICIAL SEQUENCE
  Engineered albumin binding polypeptide
LAEAKVLANRELDKYGKSDYYKRLINRAKTVEGVHALIAEILAAKP

SEQ ID NO: 137 - protein, 46 aa, ARTIFICIAL SEQUENCE
  Engineered albumin binding polypeptide
LAEAKVLANRELDKYGCSDYYKNLINRARTVEGVDTLIHDILAAKP

SEQ ID NO: 138 - protein, 46 aa, ARTIFICIAL SEQUENCE
  Engineered albumin binding polypeptide
LAEAKVLANRELDKYGKSDYYKNLINRARTVEGVDTLIHDILAACP

SEQ ID NO: 139 - protein, 46 aa, ARTIFICIAL SEQUENCE
  Engineered albumin binding polypeptide
LAEAKVLANRELDKYGCSDYYKNLINRARTVEGVDTLIHDILAACP

SEQ ID NO: 140 - protein, 46 aa, ARTIFICIAL SEQUENCE
  Engineered albumin binding polypeptide
LAEAKVLANRELDKYGKSDYYKNLINRARTVEGVDTLIHDILAAKP

SEQ ID NO: 141 - protein, 46 aa, ARTIFICIAL SEQUENCE
  Engineered albumin binding polypeptide
LAEAKVLANRELDKYGCSDFYKKVINRARTVEGVQALIADILAAKP

SEQ ID NO: 142 - protein, 46 aa, ARTIFICIAL SEQUENCE
  Engineered albumin binding polypeptide
LAEAKVLANRELDKYGKSDFYKKVINRARTVEGVQALIADILAACP

SEQ ID NO: 143 - protein, 46 aa, ARTIFICIAL SEQUENCE
  Engineered albumin binding polypeptide
LAEAKVLANRELDKYGCSDFYKKVINRARTVEGVQALIADILAACP

SEQ ID NO: 144 - protein, 46 aa, ARTIFICIAL SEQUENCE
  Engineered albumin binding polypeptide
LAEAKVLANRELDKYGKSDFYKKVINRARTVEGVQALIADILAAKP

SEQ ID NO: 145 - protein, 46 aa, ARTIFICIAL SEQUENCE
  Engineered albumin binding polypeptide
LAEAKVLANRELDKYGCSDFYKNLINRAKTVEGVESLIADILAAKP

SEQ ID NO: 146 - protein, 46 aa, ARTIFICIAL SEQUENCE
  Engineered albumin binding polypeptide
LAEAKVLANRELDKYGKSDFYKNLINRAKTVEGVESLIADILAACP

SEQ ID NO: 147 - protein, 46 aa, ARTIFICIAL SEQUENCE
  Engineered albumin binding polypeptide
LAEAKVLANRELDKYGCSDFYKNLINRAKTVEGVESLIADILAACP

SEQ ID NO: 148 - protein, 46 aa, ARTIFICIAL SEQUENCE
  Engineered albumin binding polypeptide
LAEAKVLANRELDKYGKSDFYKNLINRAKTVEGVESLIADILAAKP

SEQ ID NO: 149 - protein, 46 aa, ARTIFICIAL SEQUENCE
  Engineered albumin binding polypeptide
LAEAKVLANRELDKYGCSDYYKNLINKAKTVEGVDALIAHILAAKP

SEQ ID NO: 150 - protein, 46 aa, ARTIFICIAL SEQUENCE
  Engineered albumin binding polypeptide
LAEAKVLANRELDKYGKSDYYKNLINKAKTVEGVDALIAHILAACP

SEQ ID NO: 151 - protein, 46 aa, ARTIFICIAL SEQUENCE
  Engineered albumin binding polypeptide
LAEAKVLANRELDKYGCSDYYKNLINKAKTVEGVDALIAHILAACP

SEQ ID NO: 152 - protein, 46 aa, ARTIFICIAL SEQUENCE
  Engineered albumin binding polypeptide
LAEAKVLANRELDKYGKSDYYKNLINKAKTVEGVDALIAHILAAKP

SEQ ID NO: 153 - protein, 46 aa, ARTIFICIAL SEQUENCE
  Engineered albumin binding polypeptide
LAEAKVLANRELDKYGCSDYYKNLINRAKTVEGVESLITHILAAKP

SEQ ID NO: 154 - protein, 46 aa, ARTIFICIAL SEQUENCE
  Engineered albumin binding polypeptide
LAEAKVLANRELDKYGKSDYYKNLINRAKTVEGVESLITHILAACP

SEQ ID NO: 155 - protein, 46 aa, ARTIFICIAL SEQUENCE
  Engineered albumin binding polypeptide
LAEAKVLANRELDKYGCSDYYKNLINRAKTVEGVESLITHILAACP

SEQ ID NO: 156 - protein, 46 aa, ARTIFICIAL SEQUENCE
  Engineered albumin binding polypeptide
LAEAKVLANRELDKYGKSDYYKNLINRAKTVEGVESLITHILAAKP

SEQ ID NO: 157 - protein, 46 aa, ARTIFICIAL SEQUENCE
  Engineered albumin binding polypeptide
LAEAKVLANRELDKYGCSDFYKNLINRARTVEGVDSLIVEILAAKP

SEQ ID NO: 158 - protein, 46 aa, ARTIFICIAL SEQUENCE
  Engineered albumin binding polypeptide
LAEAKVLANRELDKYGKSDFYKNLINRARTVEGVDSLIVEILAACP

SEQ ID NO: 159 - protein, 46 aa, ARTIFICIAL SEQUENCE
  Engineered albumin binding polypeptide
LAEAKVLANRELDKYGCSDFYKNLINRARTVEGVDSLIVEILAACP

SEQ ID NO: 160 - protein, 46 aa, ARTIFICIAL SEQUENCE
  Engineered albumin binding polypeptide
LAEAKVLANRELDKYGKSDFYKNLINRARTVEGVDSLIVEILAAKP

SEQ ID NO: 161 - protein, 46 aa, ARTIFICIAL SEQUENCE
  Engineered albumin binding polypeptide
LAEAKVLANRELDKYGCSDFYKNVINRAKTVEGVSALIREILAAKP

SEQ ID NO: 162 - protein, 46 aa, ARTIFICIAL SEQUENCE
  Engineered albumin binding polypeptide
LAEAKVLANRELDKYGKSDFYKNVINRAKTVEGVSALIREILAACP

SEQ ID NO: 163 - protein, 46 aa, ARTIFICIAL SEQUENCE
  Engineered albumin binding polypeptide
LAEAKVLANRELDKYGCSDFYKNVINRAKTVEGVSALIREILAACP

SEQ ID NO: 164 - protein, 46 aa, ARTIFICIAL SEQUENCE
  Engineered albumin binding polypeptide
LAEAKVLANRELDKYGKSDFYKNVINRAKTVEGVSALIREILAAKP

SEQ ID NO: 165 - protein, 46 aa, ARTIFICIAL SEQUENCE
  Engineered albumin binding polypeptide
LAEAKVLANRELDKYGCSDFYKNLINRAKTVEGVNALISDILAAKP

SEQ ID NO: 166 - protein, 46 aa, ARTIFICIAL SEQUENCE
  Engineered albumin binding polypeptide
LAEAKVLANRELDKYGKSDFYKNLINRAKTVEGVNALISDILAACP

SEQ ID NO: 167 - protein, 46 aa, ARTIFICIAL SEQUENCE
  Engineered albumin binding polypeptide
LAEAKVLANRELDKYGCSDFYKNLINRAKTVEGVNALISDILAACP

SEQ ID NO: 168 - protein, 46 aa, ARTIFICIAL SEQUENCE
  Engineered albumin binding polypeptide
LAEAKVLANRELDKYGKSDFYKNLINRAKTVEGVNALISDILAAKP

SEQ ID NO: 169 - protein, 46 aa, ARTIFICIAL SEQUENCE
  Engineered albumin binding polypeptide
LAEAKVLANRELDKYGCSDFYKNLINRAKTVEGVSALIQEILAAKP

SEQ ID NO: 170 - protein, 46 aa, ARTIFICIAL SEQUENCE
  Engineered albumin binding polypeptide
LAEAKVLANRELDKYGKSDFYKNLINRAKTVEGVSALIQEILAACP

SEQ ID NO: 171 - protein, 46 aa, ARTIFICIAL SEQUENCE
  Engineered albumin binding polypeptide
LAEAKVLANRELDKYGCSDFYKNLINRAKTVEGVSALIQEILAACP

SEQ ID NO: 172 - protein, 46 aa, ARTIFICIAL SEQUENCE
  Engineered albumin binding polypeptide
LAEAKVLANRELDKYGKSDFYKNLINRAKTVEGVSALIQEILAAKP

SEQ ID NO: 173 - protein, 46 aa, ARTIFICIAL SEQUENCE
  Engineered albumin binding polypeptide
LAEAKVLANRELDKYGCSDFYKNLINRAKTVEGVQSLIDHILAAKP

SEQ ID NO: 174 - protein, 46 aa, ARTIFICIAL SEQUENCE
  Engineered albumin binding polypeptide
LAEAKVLANRELDKYGKSDFYKNLINRAKTVEGVQSLIDHILAACP

SEQ ID NO: 175 - protein, 46 aa, ARTIFICIAL SEQUENCE
  Engineered albumin binding polypeptide
LAEAKVLANRELDKYGCSDFYKNLINRAKTVEGVQSLIDHILAACP

SEQ ID NO: 176 - protein, 46 aa, ARTIFICIAL SEQUENCE
  Engineered albumin binding polypeptide
LAEAKVLANRELDKYGKSDFYKNLINRAKTVEGVQSLIDHILAAKP

SEQ ID NO: 177 - protein, 46 aa, ARTIFICIAL SEQUENCE
  Engineered albumin binding polypeptide
LAEAKVLANRELDKYGCSDFYKNLINRAKTVEGVDALICHILAAKP

SEQ ID NO: 178 - protein, 46 aa, ARTIFICIAL SEQUENCE
  Engineered albumin binding polypeptide
LAEAKVLANRELDKYGKSDFYKNLINRAKTVEGVDALICHILAACP

SEQ ID NO: 179 - protein, 46 aa, ARTIFICIAL SEQUENCE
  Engineered albumin binding polypeptide
LAEAKVLANRELDKYGCSDFYKNLINRAKTVEGVDALICHILAACP

SEQ ID NO: 180 - protein, 46 aa, ARTIFICIAL SEQUENCE
  Engineered albumin binding polypeptide
LAEAKVLANRELDKYGKSDFYKNLINRAKTVEGVDALICHILAAKP

SEQ ID NO: 181 - protein, 46 aa, ARTIFICIAL SEQUENCE
  Engineered albumin binding polypeptide
LAEAKVLANRELDKYGCSDYYKRLINKAKTVEGVNALITHILAAKP

SEQ ID NO: 182 - protein, 46 aa, ARTIFICIAL SEQUENCE
  Engineered albumin binding polypeptide
LAEAKVLANRELDKYGKSDYYKRLINKAKTVEGVNALITHILAACP

SEQ ID NO: 183 - protein, 46 aa, ARTIFICIAL SEQUENCE
  Engineered albumin binding polypeptide
LAEAKVLANRELDKYGCSDYYKRLINKAKTVEGVNALITHILAACP

SEQ ID NO: 184 - protein, 46 aa, ARTIFICIAL SEQUENCE
  Engineered albumin binding polypeptide
LAEAKVLANRELDKYGKSDYYKRLINKAKTVEGVNALITHILAAKP

SEQ ID NO: 185 - protein, 46 aa, ARTIFICIAL SEQUENCE
  Engineered albumin binding polypeptide
LAEAKVLANRELDKYGCSDFYKNVINKAKTVEGVEALIADILAAKP

SEQ ID NO: 186 - protein, 46 aa, ARTIFICIAL SEQUENCE
  Engineered albumin binding polypeptide
LAEAKVLANRELDKYGKSDFYKNVINKAKTVEGVEALIADILAACP

SEQ ID NO: 187 - protein, 46 aa, ARTIFICIAL SEQUENCE
  Engineered albumin binding polypeptide
LAEAKVLANRELDKYGCSDFYKNVINKAKTVEGVEALIADILAACP

SEQ ID NO: 188 - protein, 46 aa, ARTIFICIAL SEQUENCE
  Engineered albumin binding polypeptide
LAEAKVLANRELDKYGKSDFYKNVINKAKTVEGVEALIADILAAKP

SEQ ID NO: 189 - protein, 46 aa, ARTIFICIAL SEQUENCE
  Engineered albumin binding polypeptide
LAEAKVLANRELDKYGCSDFYKNLINRAKTVEGVETLIRDILAAKP

SEQ ID NO: 190 - protein, 46 aa, ARTIFICIAL SEQUENCE
  Engineered albumin binding polypeptide
LAEAKVLANRELDKYGKSDFYKNLINRAKTVEGVETLIRDILAACP

SEQ ID NO: 191 - protein, 46 aa, ARTIFICIAL SEQUENCE
  Engineered albumin binding polypeptide
LAEAKVLANRELDKYGCSDFYKNLINRAKTVEGVETLIRDILAACP

SEQ ID NO: 192 - protein, 46 aa, ARTIFICIAL SEQUENCE
  Engineered albumin binding polypeptide
LAEAKVLANRELDKYGKSDFYKNLINRAKTVEGVETLIRDILAAKP

SEQ ID NO: 193 - protein, 46 aa, ARTIFICIAL SEQUENCE
  Engineered albumin binding polypeptide
LAEAKVLANRELDKYGCSDFYKNLINRARTVEGVQTLITDILAAKP

SEQ ID NO: 194 - protein, 46 aa, ARTIFICIAL SEQUENCE
  Engineered albumin binding polypeptide
LAEAKVLANRELDKYGKSDFYKNLINRARTVEGVQTLITDILAACP

SEQ ID NO: 195 - protein, 46 aa, ARTIFICIAL SEQUENCE
  Engineered albumin binding polypeptide
LAEAKVLANRELDKYGCSDFYKNLINRARTVEGVQTLITDILAACP

SEQ ID NO: 196 - protein, 46 aa, ARTIFICIAL SEQUENCE
  Engineered albumin binding polypeptide
LAEAKVLANRELDKYGKSDFYKNLINRARTVEGVQTLITDILAAKP

SEQ ID NO: 197 - protein, 46 aa, ARTIFICIAL SEQUENCE
  Engineered albumin binding polypeptide
LAEAKVLANRELDKYGCSDFYKRLINKAKTVEGVNALTHHILAAKP

SEQ ID NO: 198 - protein, 46 aa, ARTIFICIAL SEQUENCE
  Engineered albumin binding polypeptide
LAEAKVLANRELDKYGKSDFYKRLINKAKTVEGVNALTHHILAACP

SEQ ID NO: 199 - protein, 46 aa, ARTIFICIAL SEQUENCE
  Engineered albumin binding polypeptide
LAEAKVLANRELDKYGCSDFYKRLINKAKTVEGVNALTHHILAACP

SEQ ID NO: 200 - protein, 46 aa, ARTIFICIAL SEQUENCE
  Engineered albumin binding polypeptide
LAEAKVLANRELDKYGKSDFYKRLINKAKTVEGVNALTHHILAAKP

SEQ ID NO: 201 - protein, 46 aa, ARTIFICIAL SEQUENCE
  Engineered albumin binding polypeptide
LAEAKVLANRELDKYGCSDYYKNLINRAKTVEGVQALIAHILAAKP

SEQ ID NO: 202 - protein, 46 aa, ARTIFICIAL SEQUENCE
  Engineered albumin binding polypeptide
LAEAKVLANRELDKYGKSDYYKNLINRAKTVEGVQALIAHILAACP

SEQ ID NO: 203 - protein, 46 aa, ARTIFICIAL SEQUENCE
  Engineered albumin binding polypeptide
LAEAKVLANRELDKYGCSDYYKNLINRAKTVEGVQALIAHILAACP

SEQ ID NO: 204 - protein, 46 aa, ARTIFICIAL SEQUENCE
  Engineered albumin binding polypeptide
LAEAKVLANRELDKYGKSDYYKNLINRAKTVEGVQALIAHILAAKP

SEQ ID NO: 205 - protein, 46 aa, ARTIFICIAL SEQUENCE
  Engineered albumin binding polypeptide
LAEAKVLANRELDKYGCSDFYKNVINRAKTVEGVNSLINHILAAKP

SEQ ID NO: 206 - protein, 46 aa, ARTIFICIAL SEQUENCE
  Engineered albumin binding polypeptide
LAEAKVLANRELDKYGKSDFYKNVINRAKTVEGVNSLINHILAACP

SEQ ID NO: 207 - protein, 46 aa, ARTIFICIAL SEQUENCE
  Engineered albumin binding polypeptide
LAEAKVLANRELDKYGCSDFYKNVINRAKTVEGVNSLINHILAACP

SEQ ID NO: 208 - protein, 46 aa, ARTIFICIAL SEQUENCE
  Engineered albumin binding polypeptide
LAEAKVLANRELDKYGKSDFYKNVINRAKTVEGVNSLINHILAAKP

SEQ ID NO: 209 - protein, 46 aa, ARTIFICIAL SEQUENCE
  Engineered albumin binding polypeptide
LAEAKVLANRELDKYGCSDFYKSLINRARTVEGVDSLIRHILAAKP

SEQ ID NO: 210 - protein, 46 aa, ARTIFICIAL SEQUENCE
  Engineered albumin binding polypeptide
LAEAKVLANRELDKYGKSDFYKSLINRARTVEGVDSLIRHILAACP

SEQ ID NO: 211 - protein, 46 aa, ARTIFICIAL SEQUENCE
  Engineered albumin binding polypeptide
LAEAKVLANRELDKYGCSDFYKSLINRARTVEGVDSLIRHILAACP

SEQ ID NO: 212 - protein, 46 aa, ARTIFICIAL SEQUENCE
  Engineered albumin binding polypeptide
LAEAKVLANRELDKYGKSDFYKSLINRARTVEGVDSLIRHILAAKP

SEQ ID NO: 213 - protein, 46 aa, ARTIFICIAL SEQUENCE
  Engineered albumin binding polypeptide
LAEAKVLANRELDKYGCSDYYKNLINKAKTVEGVEALTLHILAAKP

SEQ ID NO: 214 - protein, 46 aa, ARTIFICIAL SEQUENCE
  Engineered albumin binding polypeptide
LAEAKVLANRELDKYGKSDYYKNLINKAKTVEGVEALTLHILAACP

SEQ ID NO: 215 - protein, 46 aa, ARTIFICIAL SEQUENCE
  Engineered albumin binding polypeptide
LAEAKVLANRELDKYGCSDYYKNLINKAKTVEGVEALTLHILAACP

SEQ ID NO: 216 - protein, 46 aa, ARTIFICIAL SEQUENCE
  Engineered albumin binding polypeptide
LAEAKVLANRELDKYGKSDYYKNLINKAKTVEGVEALTLHILAAKP

SEQ ID NO: 217 - protein, 46 aa, ARTIFICIAL SEQUENCE
  Engineered albumin binding polypeptide
LAEAKVLANRELDKYGCSDFYKNLINRAKTVEGVDALIAHILAAKP

SEQ ID NO: 218 - protein, 46 aa, ARTIFICIAL SEQUENCE
  Engineered albumin binding polypeptide
LAEAKVLANRELDKYGKSDFYKNLINRAKTVEGVDALIAHILAACP

SEQ ID NO: 219 - protein, 46 aa, ARTIFICIAL SEQUENCE
  Engineered albumin binding polypeptide
LAEAKVLANRELDKYGCSDFYKNLINRAKTVEGVDALIAHILAACP

SEQ ID NO: 220 - protein, 46 aa, ARTIFICIAL SEQUENCE
  Engineered albumin binding polypeptide
LAEAKVLANRELDKYGKSDFYKNLINRAKTVEGVDALIAHILAAKP

SEQ ID NO: 221 - protein, 46 aa, ARTIFICIAL SEQUENCE
  Engineered albumin binding polypeptide
LAEAKVLANRELDKYGCSDYYKNLINKAKTVEGVQALIAHILAAKP

SEQ ID NO: 222 - protein, 46 aa, ARTIFICIAL SEQUENCE
  Engineered albumin binding polypeptide
LAEAKVLANRELDKYGKSDYYKNLINKAKTVEGVQALIAHILAACP

SEQ ID NO: 223 - protein, 46 aa, ARTIFICIAL SEQUENCE
  Engineered albumin binding polypeptide
LAEAKVLANRELDKYGCSDYYKNLINKAKTVEGVQALIAHILAACP

SEQ ID NO: 224 - protein, 46 aa, ARTIFICIAL SEQUENCE
  Engineered albumin binding polypeptide
LAEAKVLANRELDKYGKSDYYKNLINKAKTVEGVQALIAHILAAKP

SEQ ID NO: 225 - protein, 46 aa, ARTIFICIAL SEQUENCE
  Engineered albumin binding polypeptide
LAEAKVLANRELDKYGCSDFYKRLINRAKTVEGVHALIGHILAAKP

SEQ ID NO: 226 - protein, 46 aa, ARTIFICIAL SEQUENCE
  Engineered albumin binding polypeptide
LAEAKVLANRELDKYGKSDFYKRLINRAKTVEGVHALIGHILAACP

SEQ ID NO: 227 - protein, 46 aa, ARTIFICIAL SEQUENCE
  Engineered albumin binding polypeptide
LAEAKVLANRELDKYGCSDFYKRLINRAKTVEGVHALIGHILAACP

SEQ ID NO: 228 - protein, 46 aa, ARTIFICIAL SEQUENCE
  Engineered albumin binding polypeptide
LAEAKVLANRELDKYGKSDFYKRLINRAKTVEGVHALIGHILAAKP

SEQ ID NO: 229 - protein, 46 aa, ARTIFICIAL SEQUENCE
  Engineered albumin binding polypeptide
LAEAKVLANRELDKYGCSDFYKRVINRAKTVEGVHALIDHILAAKP

SEQ ID NO: 230 - protein, 46 aa, ARTIFICIAL SEQUENCE
  Engineered albumin binding polypeptide
LAEAKVLANRELDKYGKSDFYKRVINRAKTVEGVHALIDHILAACP

SEQ ID NO: 231 - protein, 46 aa, ARTIFICIAL SEQUENCE
  Engineered albumin binding polypeptide
LAEAKVLANRELDKYGCSDFYKRVINRAKTVEGVHALIDHILAACP

SEQ ID NO: 232 - protein, 46 aa, ARTIFICIAL SEQUENCE
  Engineered albumin binding polypeptide
LAEAKVLANRELDKYGKSDFYKRVINRAKTVEGVHALIDHILAAKP

SEQ ID NO: 233 - protein, 46 aa, ARTIFICIAL SEQUENCE
  Engineered albumin binding polypeptide
LAEAKVLANRELDKYGCSDYYKRIINRAKTVEGVRALKLHILAAKP

SEQ ID NO: 234 - protein, 46 aa, ARTIFICIAL SEQUENCE
  Engineered albumin binding polypeptide
LAEAKVLANRELDKYGKSDYYKRIINRAKTVEGVRALKLHILAACP

SEQ ID NO: 235 - protein, 46 aa, ARTIFICIAL SEQUENCE
  Engineered albumin binding polypeptide
LAEAKVLANRELDKYGCSDYYKRIINRAKTVEGVRALKLHILAACP

SEQ ID NO: 236 - protein, 46 aa, ARTIFICIAL SEQUENCE
  Engineered albumin binding polypeptide
LAEAKVLANRELDKYGKSDYYKRIINRAKTVEGVRALKLHILAAKP

SEQ ID NO: 237 - protein, 46 aa, ARTIFICIAL SEQUENCE
  Engineered albumin binding polypeptide
LAEAKVLANRELDKYGCSDFYKRVINRAKTVEGVSALIHEILAAKP

SEQ ID NO: 238 - protein, 46 aa, ARTIFICIAL SEQUENCE
  Engineered albumin binding polypeptide
LAEAKVLANRELDKYGKSDFYKRVINRAKTVEGVSALIHEILAACP

SEQ ID NO: 239 - protein, 46 aa, ARTIFICIAL SEQUENCE
  Engineered albumin binding polypeptide
LAEAKVLANRELDKYGCSDFYKRVINRAKTVEGVSALIHEILAACP

SEQ ID NO: 240 - protein, 46 aa, ARTIFICIAL SEQUENCE
  Engineered albumin binding polypeptide
LAEAKVLANRELDKYGKSDFYKRVINRAKTVEGVSALIHEILAAKP

SEQ ID NO: 241 - protein, 46 aa, ARTIFICIAL SEQUENCE
  Engineered albumin binding polypeptide
LAEAKVLANRELDKYGCSDYYKRLINRAKTVEGVNSLISHILAAKP

SEQ ID NO: 242 - protein, 46 aa, ARTIFICIAL SEQUENCE
  Engineered albumin binding polypeptide
LAEAKVLANRELDKYGKSDYYKRLINRAKTVEGVNSLISHILAACP

SEQ ID NO: 243 - protein, 46 aa, ARTIFICIAL SEQUENCE
  Engineered albumin binding polypeptide
LAEAKVLANRELDKYGCSDYYKRLINRAKTVEGVNSLISHILAACP

SEQ ID NO: 244 - protein, 46 aa, ARTIFICIAL SEQUENCE
  Engineered albumin binding polypeptide
LAEAKVLANRELDKYGKSDYYKRLINRAKTVEGVNSLISHILAAKP

SEQ ID NO: 245 - protein, 46 aa, ARTIFICIAL SEQUENCE
  Engineered albumin binding polypeptide
LAEAKVLANRELDKYGCSDFYKRLINRAKTVEGVSSLKGHILAAKP

SEQ ID NO: 246 - protein, 46 aa, ARTIFICIAL SEQUENCE
  Engineered albumin binding polypeptide
LAEAKVLANRELDKYGKSDFYKRLINRAKTVEGVSSLKGHILAACP

SEQ ID NO: 247 - protein, 46 aa, ARTIFICIAL SEQUENCE
  Engineered albumin binding polypeptide
LAEAKVLANRELDKYGCSDFYKRLINRAKTVEGVSSLKGHILAACP

SEQ ID NO: 248 - protein, 46 aa, ARTIFICIAL SEQUENCE
  Engineered albumin binding polypeptide
LAEAKVLANRELDKYGKSDFYKRLINRAKTVEGVSSLKGHILAAKP

SEQ ID NO: 249 - protein, 46 aa, ARTIFICIAL SEQUENCE
  Engineered albumin binding polypeptide
LAEAKVLANRELDKYGCSDFYKRVINRAKTVEGVDSLIAEILAAKP

SEQ ID NO: 250 - protein, 46 aa, ARTIFICIAL SEQUENCE
  Engineered albumin binding polypeptide
LAEAKVLANRELDKYGKSDFYKRVINRAKTVEGVDSLIAEILAACP

SEQ ID NO: 251 - protein, 46 aa, ARTIFICIAL SEQUENCE
  Engineered albumin binding polypeptide
LAEAKVLANRELDKYGCSDFYKRVINRAKTVEGVDSLIAEILAACP

SEQ ID NO: 252 - protein, 46 aa, ARTIFICIAL SEQUENCE
  Engineered albumin binding polypeptide
LAEAKVLANRELDKYGKSDFYKRVINRAKTVEGVDSLIAEILAAKP

SEQ ID NO: 253 - protein, 46 aa, ARTIFICIAL SEQUENCE
  Engineered albumin binding polypeptide
LAEAKVLANRELDKYGCSDFYKRLINRARTVEGVQTLISDILAAKP

SEQ ID NO: 254 - protein, 46 aa, ARTIFICIAL SEQUENCE
  Engineered albumin binding polypeptide
LAEAKVLANRELDKYGKSDFYKRLINRARTVEGVQTLISDILAACP

SEQ ID NO: 255 - protein, 46 aa, ARTIFICIAL SEQUENCE
  Engineered albumin binding polypeptide
LAEAKVLANRELDKYGCSDFYKRLINRARTVEGVQTLISDILAACP

SEQ ID NO: 256 - protein, 46 aa, ARTIFICIAL SEQUENCE
  Engineered albumin binding polypeptide
LAEAKVLANRELDKYGKSDFYKRLINRARTVEGVQTLISDILAAKP

SEQ ID NO: 257 - protein, 46 aa, ARTIFICIAL SEQUENCE
  Engineered albumin binding polypeptide
LAEAKVLANRELDKYGCSDFYKRFINKAKTVEGVETLISEILAAKP

SEQ ID NO: 258 - protein, 46 aa, ARTIFICIAL SEQUENCE
  Engineered albumin binding polypeptide
LAEAKVLANRELDKYGKSDFYKRFINKAKTVEGVETLISEILAACP

SEQ ID NO: 259 - protein, 46 aa, ARTIFICIAL SEQUENCE
  Engineered albumin binding polypeptide
LAEAKVLANRELDKYGCSDFYKRFINKAKTVEGVETLISEILAACP

SEQ ID NO: 260 - protein, 46 aa, ARTIFICIAL SEQUENCE
  Engineered albumin binding polypeptide
LAEAKVLANRELDKYGKSDFYKRFINKAKTVEGVETLISEILAAKP

SEQ ID NO: 261 - protein, 46 aa, ARTIFICIAL SEQUENCE
  Engineered albumin binding polypeptide
LAEAKVLANRELDKYGCSDFYKRLINRAKTVEGVHSLTDEILAAKP

SEQ ID NO: 262 - protein, 46 aa, ARTIFICIAL SEQUENCE
  Engineered albumin binding polypeptide
LAEAKVLANRELDKYGKSDFYKRLINRAKTVEGVHSLTDEILAACP

SEQ ID NO: 263 - protein, 46 aa, ARTIFICIAL SEQUENCE
  Engineered albumin binding polypeptide
LAEAKVLANRELDKYGCSDFYKRLINRAKTVEGVHSLTDEILAACP

SEQ ID NO: 264 - protein, 46 aa, ARTIFICIAL SEQUENCE
  Engineered albumin binding polypeptide
LAEAKVLANRELDKYGKSDFYKRLINRAKTVEGVHSLTDEILAAKP

SEQ ID NO: 265 - protein, 46 aa, ARTIFICIAL SEQUENCE
  Engineered albumin binding polypeptide
LAEAKVLANRELDKYGCSDYYKRVINKAKTVEGVSSLTAEILAAKP

SEQ ID NO: 266 - protein, 46 aa, ARTIFICIAL SEQUENCE
  Engineered albumin binding polypeptide
LAEAKVLANRELDKYGKSDYYKRVINKAKTVEGVSSLTAEILAACP

SEQ ID NO: 267 - protein, 46 aa, ARTIFICIAL SEQUENCE
  Engineered albumin binding polypeptide
LAEAKVLANRELDKYGCSDYYKRVINKAKTVEGVSSLTAEILAACP

SEQ ID NO: 268 - protein, 46 aa, ARTIFICIAL SEQUENCE
  Engineered albumin binding polypeptide
LAEAKVLANRELDKYGKSDYYKRVINKAKTVEGVSSLTAEILAAKP

SEQ ID NO: 269 - protein, 46 aa, ARTIFICIAL SEQUENCE
  Engineered albumin binding polypeptide
LAEAKVLANRELDKYGCSDFYKRLINRAKTVEGVDALTSHILAAKP

SEQ ID NO: 270 - protein, 46 aa, ARTIFICIAL SEQUENCE
  Engineered albumin binding polypeptide
LAEAKVLANRELDKYGKSDFYKRLINRAKTVEGVDALTSHILAACP

SEQ ID NO: 271 - protein, 46 aa, ARTIFICIAL SEQUENCE
  Engineered albumin binding polypeptide
LAEAKVLANRELDKYGCSDFYKRLINRAKTVEGVDALTSHILAACP

SEQ ID NO: 272 - protein, 46 aa, ARTIFICIAL SEQUENCE
  Engineered albumin binding polypeptide
LAEAKVLANRELDKYGKSDFYKRLINRAKTVEGVDALTSHILAAKP

SEQ ID NO: 273 - protein, 46 aa, ARTIFICIAL SEQUENCE
  Engineered albumin binding polypeptide
LAEAKVLANRELDKYGCSDFYKRLINKAKTVEGVSTLIHDILAAKP

SEQ ID NO: 274 - protein, 46 aa, ARTIFICIAL SEQUENCE
  Engineered albumin binding polypeptide
LAEAKVLANRELDKYGKSDFYKRLINKAKTVEGVSTLIHDILAACP

SEQ ID NO: 275 - protein, 46 aa, ARTIFICIAL SEQUENCE
  Engineered albumin binding polypeptide
LAEAKVLANRELDKYGCSDFYKRLINKAKTVEGVSTLIHDILAACP

SEQ ID NO: 276 - protein, 46 aa, ARTIFICIAL SEQUENCE
  Engineered albumin binding polypeptide
LAEAKVLANRELDKYGKSDFYKRLINKAKTVEGVSTLIHDILAAKP

SEQ ID NO: 277 - protein, 46 aa, ARTIFICIAL SEQUENCE
  Engineered albumin binding polypeptide
LAEAKVLANRELDKYGCSDFYKRLINRAKTVEGVSTLIHDILAAKP

SEQ ID NO: 278 - protein, 46 aa, ARTIFICIAL SEQUENCE
  Engineered albumin binding polypeptide
LAEAKVLANRELDKYGKSDFYKRLINRAKTVEGVSTLIHDILAACP

SEQ ID NO: 279 - protein, 46 aa, ARTIFICIAL SEQUENCE
  Engineered albumin binding polypeptide
LAEAKVLANRELDKYGCSDFYKRLINRAKTVEGVSTLIHDILAACP

SEQ ID NO: 280 - protein, 46 aa, ARTIFICIAL SEQUENCE
  Engineered albumin binding polypeptide
LAEAKVLANRELDKYGKSDFYKRLINRAKTVEGVSTLIHDILAAKP

SEQ ID NO: 281 - protein, 46 aa, ARTIFICIAL SEQUENCE
  Engineered albumin binding polypeptide
LAEAKVLANRELDKYGCSDFYKRLINRAKTVEGVQALISEILAAKP

SEQ ID NO: 282 - protein, 46 aa, ARTIFICIAL SEQUENCE
  Engineered albumin binding polypeptide
LAEAKVLANRELDKYGKSDFYKRLINRAKTVEGVQALISEILAACP

SEQ ID NO: 283 - protein, 46 aa, ARTIFICIAL SEQUENCE
  Engineered albumin binding polypeptide
LAEAKVLANRELDKYGCSDFYKRLINRAKTVEGVQALISEILAACP

SEQ ID NO: 284 - protein, 46 aa, ARTIFICIAL SEQUENCE
  Engineered albumin binding polypeptide
LAEAKVLANRELDKYGKSDFYKRLINRAKTVEGVQALISEILAAKP

SEQ ID NO: 285 - protein, 46 aa, ARTIFICIAL SEQUENCE
  Engineered albumin binding polypeptide
LAEAKVLANRELDKYGCSDYYKRLINKAKTVEGVDSLIVHILAAKP

SEQ ID NO: 286 - protein, 46 aa, ARTIFICIAL SEQUENCE
  Engineered albumin binding polypeptide
LAEAKVLANRELDKYGKSDYYKRLINKAKTVEGVDSLIVHILAACP

SEQ ID NO: 287 - protein, 46 aa, ARTIFICIAL SEQUENCE
  Engineered albumin binding polypeptide
LAEAKVLANRELDKYGCSDYYKRLINKAKTVEGVDSLIVHILAACP

SEQ ID NO: 288 - protein, 46 aa, ARTIFICIAL SEQUENCE
  Engineered albumin binding polypeptide
LAEAKVLANRELDKYGKSDYYKRLINKAKTVEGVDSLIVHILAAKP

SEQ ID NO: 289 - protein, 46 aa, ARTIFICIAL SEQUENCE
  Engineered albumin binding polypeptide
LAEAKVLANRELDKYGCSDFYKRLINRAKTVEGVQSLITEILAAKP

SEQ ID NO: 290 - protein, 46 aa, ARTIFICIAL SEQUENCE
  Engineered albumin binding polypeptide
LAEAKVLANRELDKYGKSDFYKRLINRAKTVEGVQSLITEILAACP

SEQ ID NO: 291 - protein, 46 aa, ARTIFICIAL SEQUENCE
  Engineered albumin binding polypeptide
LAEAKVLANRELDKYGCSDFYKRLINRAKTVEGVQSLITEILAACP

SEQ ID NO: 292 - protein, 46 aa, ARTIFICIAL SEQUENCE
  Engineered albumin binding polypeptide
LAEAKVLANRELDKYGKSDFYKRLINRAKTVEGVQSLITEILAAKP

SEQ ID NO: 293 - protein, 46 aa, ARTIFICIAL SEQUENCE
  Engineered albumin binding polypeptide
LAEAKVLANRELDKYGCSDYYKRLINRAKTVEGVDALITHILAAKP

SEQ ID NO: 294 - protein, 46 aa, ARTIFICIAL SEQUENCE
  Engineered albumin binding polypeptide
LAEAKVLANRELDKYGKSDYYKRLINRAKTVEGVDALITHILAACP

SEQ ID NO: 295 - protein, 46 aa, ARTIFICIAL SEQUENCE
  Engineered albumin binding polypeptide
LAEAKVLANRELDKYGCSDYYKRLINRAKTVEGVDALITHILAACP

SEQ ID NO: 296 - protein, 46 aa, ARTIFICIAL SEQUENCE
  Engineered albumin binding polypeptide
LAEAKVLANRELDKYGKSDYYKRLINRAKTVEGVDALITHILAAKP

SEQ ID NO: 297 - protein, 46 aa, ARTIFICIAL SEQUENCE
  Engineered albumin binding polypeptide
LAEAKVLANRELDKYGCSDFYKRMINRAKTVEGVDSLITHILAAKP

SEQ ID NO: 298 - protein, 46 aa, ARTIFICIAL SEQUENCE
  Engineered albumin binding polypeptide
LAEAKVLANRELDKYGKSDFYKRMINRAKTVEGVDSLITHILAACP

SEQ ID NO: 299 - protein, 46 aa, ARTIFICIAL SEQUENCE
  Engineered albumin binding polypeptide
LAEAKVLANRELDKYGCSDFYKRMINRAKTVEGVDSLITHILAACP

SEQ ID NO: 300 - protein, 46 aa, ARTIFICIAL SEQUENCE
  Engineered albumin binding polypeptide
LAEAKVLANRELDKYGKSDFYKRMINRAKTVEGVDSLITHILAAKP

SEQ ID NO: 301 - protein, 46 aa, ARTIFICIAL SEQUENCE
  Engineered albumin binding polypeptide
LAEAKVLANRELDKYGCSDFYKRLINRAKTVEGVTTLTTDILAAKP

SEQ ID NO: 302 - protein, 46 aa, ARTIFICIAL SEQUENCE
  Engineered albumin binding polypeptide
LAEAKVLANRELDKYGKSDFYKRLINRAKTVEGVTTLTTDILAACP

SEQ ID NO: 303 - protein, 46 aa, ARTIFICIAL SEQUENCE
  Engineered albumin binding polypeptide
LAEAKVLANRELDKYGCSDFYKRLINRAKTVEGVTTLTTDILAACP

SEQ ID NO: 304 - protein, 46 aa, ARTIFICIAL SEQUENCE
  Engineered albumin binding polypeptide
LAEAKVLANRELDKYGKSDFYKRLINRAKTVEGVTTLTTDILAAKP

SEQ ID NO: 305 - protein, 46 aa, ARTIFICIAL SEQUENCE
  Engineered albumin binding polypeptide
LAEAKVLANRELDKYGCSDFYKRLINRAKTVEGVESLIDHILAAKP

SEQ ID NO: 306 - protein, 46 aa, ARTIFICIAL SEQUENCE
  Engineered albumin binding polypeptide
LAEAKVLANRELDKYGKSDFYKRLINRAKTVEGVESLIDHILAACP

SEQ ID NO: 307 - protein, 46 aa, ARTIFICIAL SEQUENCE
  Engineered albumin binding polypeptide
LAEAKVLANRELDKYGCSDFYKRLINRAKTVEGVESLIDHILAACP

SEQ ID NO: 308 - protein, 46 aa, ARTIFICIAL SEQUENCE
  Engineered albumin binding polypeptide
LAEAKVLANRELDKYGKSDFYKRLINRAKTVEGVESLIDHILAAKP

SEQ ID NO: 309 - protein, 46 aa, ARTIFICIAL SEQUENCE
  Engineered albumin binding polypeptide
LAEAKVLANRELDKYGCSDFYKRYINRAKTVEGVHTLIGHILAAKP

SEQ ID NO: 310 - protein, 46 aa, ARTIFICIAL SEQUENCE
  Engineered albumin binding polypeptide
LAEAKVLANRELDKYGKSDFYKRYINRAKTVEGVHTLIGHILAACP

SEQ ID NO: 311 - protein, 46 aa, ARTIFICIAL SEQUENCE
  Engineered albumin binding polypeptide
LAEAKVLANRELDKYGCSDFYKRYINRAKTVEGVHTLIGHILAACP

SEQ ID NO: 312 - protein, 46 aa, ARTIFICIAL SEQUENCE
  Engineered albumin binding polypeptide
LAEAKVLANRELDKYGKSDFYKRYINRAKTVEGVHTLIGHILAAKP

SEQ ID NO: 313 - protein, 46 aa, ARTIFICIAL SEQUENCE
  Engineered albumin binding polypeptide
LAEAKVLANRELDKYGCSDFYKRLINRAKTVEGVQTLISDILAAKP

SEQ ID NO: 314 - protein, 46 aa, ARTIFICIAL SEQUENCE
  Engineered albumin binding polypeptide
LAEAKVLANRELDKYGKSDFYKRLINRAKTVEGVQTLISDILAACP

SEQ ID NO: 315 - protein, 46 aa, ARTIFICIAL SEQUENCE
  Engineered albumin binding polypeptide
LAEAKVLANRELDKYGCSDFYKRLINRAKTVEGVQTLISDILAACP

SEQ ID NO: 316 - protein, 46 aa, ARTIFICIAL SEQUENCE
  Engineered albumin binding polypeptide
LAEAKVLANRELDKYGKSDFYKRLINRAKTVEGVQTLISDILAAKP

SEQ ID NO: 317 - protein, 46 aa, ARTIFICIAL SEQUENCE
  Engineered albumin binding polypeptide
LAEAKVLANRELDKYGCSDFYKRLINRAKTVEGVNSLTSHILAAKP

SEQ ID NO: 318 - protein, 46 aa, ARTIFICIAL SEQUENCE
  Engineered albumin binding polypeptide
LAEAKVLANRELDKYGKSDFYKRLINRAKTVEGVNSLTSHILAACP

SEQ ID NO: 319 - protein, 46 aa, ARTIFICIAL SEQUENCE
  Engineered albumin binding polypeptide
LAEAKVLANRELDKYGCSDFYKRLINRAKTVEGVNSLTSHILAACP

SEQ ID NO: 320 - protein, 46 aa, ARTIFICIAL SEQUENCE
  Engineered albumin binding polypeptide
LAEAKVLANRELDKYGKSDFYKRLINRAKTVEGVNSLTSHILAAKP

SEQ ID NO: 321 - protein, 46 aa, ARTIFICIAL SEQUENCE
  Engineered albumin binding polypeptide
LAEAKVLANRELDKYGCSDFYKRLINRAKTVEGVNTLIHDILAAKP

SEQ ID NO: 322 - protein, 46 aa, ARTIFICIAL SEQUENCE
  Engineered albumin binding polypeptide
LAEAKVLANRELDKYGKSDFYKRLINRAKTVEGVNTLIHDILAACP

SEQ ID NO: 323 - protein, 46 aa, ARTIFICIAL SEQUENCE
  Engineered albumin binding polypeptide
LAEAKVLANRELDKYGCSDFYKRLINRAKTVEGVNTLIHDILAACP

SEQ ID NO: 324 - protein, 46 aa, ARTIFICIAL SEQUENCE
  Engineered albumin binding polypeptide
LAEAKVLANRELDKYGKSDFYKRLINRAKTVEGVNTLIHDILAAKP

SEQ ID NO: 325 - protein, 46 aa, ARTIFICIAL SEQUENCE
  Engineered albumin binding polypeptide
LAEAKVLANRELDKYGCSDFYKRLINRAKTVEGVESLIGEILAAKP

SEQ ID NO: 326 - protein, 46 aa, ARTIFICIAL SEQUENCE
  Engineered albumin binding polypeptide
LAEAKVLANRELDKYGKSDFYKRLINRAKTVEGVESLIGEILAACP

SEQ ID NO: 327 - protein, 46 aa, ARTIFICIAL SEQUENCE
  Engineered albumin binding polypeptide
LAEAKVLANRELDKYGCSDFYKRLINRAKTVEGVESLIGEILAACP

SEQ ID NO: 328 - protein, 46 aa, ARTIFICIAL SEQUENCE
  Engineered albumin binding polypeptide
LAEAKVLANRELDKYGKSDFYKRLINRAKTVEGVESLIGEILAAKP

SEQ ID NO: 329 - protein, 46 aa, ARTIFICIAL SEQUENCE
  Engineered albumin binding polypeptide
LAEAKVLANRELDKYGCSDFYKRLINKAKTVEGVHTLIHDILAAKP

SEQ ID NO: 330 - protein, 46 aa, ARTIFICIAL SEQUENCE
  Engineered albumin binding polypeptide
LAEAKVLANRELDKYGKSDFYKRLINKAKTVEGVHTLIHDILAACP

SEQ ID NO: 331 - protein, 46 aa, ARTIFICIAL SEQUENCE
  Engineered albumin binding polypeptide
LAEAKVLANRELDKYGCSDFYKRLINKAKTVEGVHTLIHDILAACP

SEQ ID NO: 332 - protein, 46 aa, ARTIFICIAL SEQUENCE
  Engineered albumin binding polypeptide
LAEAKVLANRELDKYGKSDFYKRLINKAKTVEGVHTLIHDILAAKP

SEQ ID NO: 333 - protein, 46 aa, ARTIFICIAL SEQUENCE
  Engineered albumin binding polypeptide
LAEAKVLANRELDKYGCSDYYKRLINKAKTVEGVSALKMHILAAKP

SEQ ID NO: 334 - protein, 46 aa, ARTIFICIAL SEQUENCE
  Engineered albumin binding polypeptide
LAEAKVLANRELDKYGKSDYYKRLINKAKTVEGVSALKMHILAACP

SEQ ID NO: 335 - protein, 46 aa, ARTIFICIAL SEQUENCE
  Engineered albumin binding polypeptide
LAEAKVLANRELDKYGCSDYYKRLINKAKTVEGVSALKMHILAACP

SEQ ID NO: 336 - protein, 46 aa, ARTIFICIAL SEQUENCE
  Engineered albumin binding polypeptide
LAEAKVLANRELDKYGKSDYYKRLINKAKTVEGVSALKMHILAAKP

SEQ ID NO: 337 - protein, 46 aa, ARTIFICIAL SEQUENCE
  Engineered albumin binding polypeptide
LAEAKVLANRELDKYGCSDFYKRLINKAKTVEGVDALIVHILAAKP

SEQ ID NO: 338 - protein, 46 aa, ARTIFICIAL SEQUENCE
  Engineered albumin binding polypeptide
LAEAKVLANRELDKYGKSDFYKRLINKAKTVEGVDALIVHILAACP

SEQ ID NO: 339 - protein, 46 aa, ARTIFICIAL SEQUENCE
  Engineered albumin binding polypeptide
LAEAKVLANRELDKYGCSDFYKRLINKAKTVEGVDALIVHILAACP

SEQ ID NO: 340 - protein, 46 aa, ARTIFICIAL SEQUENCE
  Engineered albumin binding polypeptide
LAEAKVLANRELDKYGKSDFYKRLINKAKTVEGVDALIVHILAAKP

SEQ ID NO: 341 - protein, 46 aa, ARTIFICIAL SEQUENCE
  Engineered albumin binding polypeptide
LAEAKVLANRELDKYGCSDYYKRLINRARTVEGVDTLIHDILAAKP

SEQ ID NO: 342 - protein, 46 aa, ARTIFICIAL SEQUENCE
  Engineered albumin binding polypeptide
LAEAKVLANRELDKYGKSDYYKRLINRARTVEGVDTLIHDILAACP

SEQ ID NO: 343 - protein, 46 aa, ARTIFICIAL SEQUENCE
  Engineered albumin binding polypeptide
LAEAKVLANRELDKYGCSDYYKRLINRARTVEGVDTLIHDILAACP

SEQ ID NO: 344 - protein, 46 aa, ARTIFICIAL SEQUENCE
  Engineered albumin binding polypeptide
LAEAKVLANRELDKYGKSDYYKRLINRARTVEGVDTLIHDILAAKP

SEQ ID NO: 345 - protein, 46 aa, ARTIFICIAL SEQUENCE
  Engineered albumin binding polypeptide
LAEAKVLANRELDKYGCSDFYKRVINRARTVEGVQALIADILAAKP

SEQ ID NO: 346 - protein, 46 aa, ARTIFICIAL SEQUENCE
  Engineered albumin binding polypeptide
LAEAKVLANRELDKYGKSDFYKRVINRARTVEGVQALIADILAACP

SEQ ID NO: 347 - protein, 46 aa, ARTIFICIAL SEQUENCE
  Engineered albumin binding polypeptide
LAEAKVLANRELDKYGCSDFYKRVINRARTVEGVQALIADILAACP

SEQ ID NO: 348 - protein, 46 aa, ARTIFICIAL SEQUENCE
  Engineered albumin binding polypeptide
LAEAKVLANRELDKYGKSDFYKRVINRARTVEGVQALIADILAAKP

SEQ ID NO: 349 - protein, 46 aa, ARTIFICIAL SEQUENCE
  Engineered albumin binding polypeptide
LAEAKVLANRELDKYGCSDFYKRLINRAKTVEGVESLIADILAAKP

SEQ ID NO: 350 - protein, 46 aa, ARTIFICIAL SEQUENCE
  Engineered albumin binding polypeptide
LAEAKVLANRELDKYGKSDFYKRLINRAKTVEGVESLIADILAACP

SEQ ID NO: 351 - protein, 46 aa, ARTIFICIAL SEQUENCE
  Engineered albumin binding polypeptide
LAEAKVLANRELDKYGCSDFYKRLINRAKTVEGVESLIADILAACP

SEQ ID NO: 352 - protein, 46 aa, ARTIFICIAL SEQUENCE
  Engineered albumin binding polypeptide
LAEAKVLANRELDKYGKSDFYKRLINRAKTVEGVESLIADILAAKP

SEQ ID NO: 353 - protein, 46 aa, ARTIFICIAL SEQUENCE
  Engineered albumin binding polypeptide
LAEAKVLANRELDKYGCSDYYKRLINKAKTVEGVDALIAHILAAKP

SEQ ID NO: 354 - protein, 46 aa, ARTIFICIAL SEQUENCE
  Engineered albumin binding polypeptide
LAEAKVLANRELDKYGKSDYYKRLINKAKTVEGVDALIAHILAACP

SEQ ID NO: 355 - protein, 46 aa, ARTIFICIAL SEQUENCE
  Engineered albumin binding polypeptide
LAEAKVLANRELDKYGCSDYYKRLINKAKTVEGVDALIAHILAACP

SEQ ID NO: 356 - protein, 46 aa, ARTIFICIAL SEQUENCE
  Engineered albumin binding polypeptide
LAEAKVLANRELDKYGKSDYYKRLINKAKTVEGVDALIAHILAAKP

SEQ ID NO: 357 - protein, 46 aa, ARTIFICIAL SEQUENCE
  Engineered albumin binding polypeptide
LAEAKVLANRELDKYGCSDYYKRLINRAKTVEGVESLITHILAAKP

SEQ ID NO: 358 - protein, 46 aa, ARTIFICIAL SEQUENCE
  Engineered albumin binding polypeptide
LAEAKVLANRELDKYGKSDYYKRLINRAKTVEGVESLITHILAACP

SEQ ID NO: 359 - protein, 46 aa, ARTIFICIAL SEQUENCE
  Engineered albumin binding polypeptide
LAEAKVLANRELDKYGCSDYYKRLINRAKTVEGVESLITHILAACP

SEQ ID NO: 360 - protein, 46 aa, ARTIFICIAL SEQUENCE
  Engineered albumin binding polypeptide
LAEAKVLANRELDKYGKSDYYKRLINRAKTVEGVESLITHILAAKP

SEQ ID NO: 361 - protein, 46 aa, ARTIFICIAL SEQUENCE
  Engineered albumin binding polypeptide
LAEAKVLANRELDKYGCSDFYKRLINRARTVEGVDSLIVEILAAKP

SEQ ID NO: 362 - protein, 46 aa, ARTIFICIAL SEQUENCE
  Engineered albumin binding polypeptide
LAEAKVLANRELDKYGKSDFYKRLINRARTVEGVDSLIVEILAACP

SEQ ID NO: 363 - protein, 46 aa, ARTIFICIAL SEQUENCE
  Engineered albumin binding polypeptide
LAEAKVLANRELDKYGCSDFYKRLINRARTVEGVDSLIVEILAACP

SEQ ID NO: 364 - protein, 46 aa, ARTIFICIAL SEQUENCE
  Engineered albumin binding polypeptide
LAEAKVLANRELDKYGKSDFYKRLINRARTVEGVDSLIVEILAAKP

SEQ ID NO: 365 - protein, 46 aa, ARTIFICIAL SEQUENCE
  Engineered albumin binding polypeptide
LAEAKVLANRELDKYGCSDFYKRVINRAKTVEGVSALIREILAAKP

SEQ ID NO: 366 - protein, 46 aa, ARTIFICIAL SEQUENCE
  Engineered albumin binding polypeptide
LAEAKVLANRELDKYGKSDFYKRVINRAKTVEGVSALIREILAACP

SEQ ID NO: 367 - protein, 46 aa, ARTIFICIAL SEQUENCE
  Engineered albumin binding polypeptide
LAEAKVLANRELDKYGCSDFYKRVINRAKTVEGVSALIREILAACP

SEQ ID NO: 368 - protein, 46 aa, ARTIFICIAL SEQUENCE
  Engineered albumin binding polypeptide
LAEAKVLANRELDKYGKSDFYKRVINRAKTVEGVSALIREILAAKP

SEQ ID NO: 369 - protein, 46 aa, ARTIFICIAL SEQUENCE
  Engineered albumin binding polypeptide
LAEAKVLANRELDKYGCSDFYKRLINRAKTVEGVNALISDILAAKP

SEQ ID NO: 370 - protein, 46 aa, ARTIFICIAL SEQUENCE
  Engineered albumin binding polypeptide
LAEAKVLANRELDKYGKSDFYKRLINRAKTVEGVNALISDILAACP

SEQ ID NO: 371 - protein, 46 aa, ARTIFICIAL SEQUENCE
  Engineered albumin binding polypeptide
LAEAKVLANRELDKYGCSDFYKRLINRAKTVEGVNALISDILAACP

SEQ ID NO: 372 - protein, 46 aa, ARTIFICIAL SEQUENCE
  Engineered albumin binding polypeptide
LAEAKVLANRELDKYGKSDFYKRLINRAKTVEGVNALISDILAAKP

SEQ ID NO: 373 - protein, 46 aa, ARTIFICIAL SEQUENCE
  Engineered albumin binding polypeptide
LAEAKVLANRELDKYGCSDFYKRLINRAKTVEGVSALIQEILAAKP

SEQ ID NO: 374 - protein, 46 aa, ARTIFICIAL SEQUENCE
  Engineered albumin binding polypeptide
LAEAKVLANRELDKYGKSDFYKRLINRAKTVEGVSALIQEILAACP

SEQ ID NO: 375 - protein, 46 aa, ARTIFICIAL SEQUENCE
  Engineered albumin binding polypeptide
LAEAKVLANRELDKYGCSDFYKRLINRAKTVEGVSALIQEILAACP

SEQ ID NO: 376 - protein, 46 aa, ARTIFICIAL SEQUENCE
  Engineered albumin binding polypeptide
LAEAKVLANRELDKYGKSDFYKRLINRAKTVEGVSALIQEILAAKP

SEQ ID NO: 377 - protein, 46 aa, ARTIFICIAL SEQUENCE
  Engineered albumin binding polypeptide
LAEAKVLANRELDKYGCSDFYKRLINRAKTVEGVQSLIDHILAAKP

SEQ ID NO: 378 - protein, 46 aa, ARTIFICIAL SEQUENCE
  Engineered albumin binding polypeptide
LAEAKVLANRELDKYGKSDFYKRLINRAKTVEGVQSLIDHILAACP

SEQ ID NO: 379 - protein, 46 aa, ARTIFICIAL SEQUENCE
  Engineered albumin binding polypeptide
LAEAKVLANRELDKYGCSDFYKRLINRAKTVEGVQSLIDHILAACP

SEQ ID NO: 380 - protein, 46 aa, ARTIFICIAL SEQUENCE
  Engineered albumin binding polypeptide
LAEAKVLANRELDKYGKSDFYKRLINRAKTVEGVQSLIDHILAAKP

SEQ ID NO: 381 - protein, 46 aa, ARTIFICIAL SEQUENCE
  Engineered albumin binding polypeptide
LAEAKVLANRELDKYGCSDFYKRLINRAKTVEGVDALICHILAAKP

SEQ ID NO: 382 - protein, 46 aa, ARTIFICIAL SEQUENCE
  Engineered albumin binding polypeptide
LAEAKVLANRELDKYGKSDFYKRLINRAKTVEGVDALICHILAACP

SEQ ID NO: 383 - protein, 46 aa, ARTIFICIAL SEQUENCE
  Engineered albumin binding polypeptide
LAEAKVLANRELDKYGCSDFYKRLINRAKTVEGVDALICHILAACP

SEQ ID NO: 384 - protein, 46 aa, ARTIFICIAL SEQUENCE
  Engineered albumin binding polypeptide
LAEAKVLANRELDKYGKSDFYKRLINRAKTVEGVDALICHILAAKP

SEQ ID NO: 385 - protein, 46 aa, ARTIFICIAL SEQUENCE
  Engineered albumin binding polypeptide
LAEAKVLANRELDKYGCSDFYKRVINKAKTVEGVEALIADILAAKP

SEQ ID NO: 386 - protein, 46 aa, ARTIFICIAL SEQUENCE
  Engineered albumin binding polypeptide
LAEAKVLANRELDKYGKSDFYKRVINKAKTVEGVEALIADILAACP

SEQ ID NO: 387 - protein, 46 aa, ARTIFICIAL SEQUENCE
  Engineered albumin binding polypeptide
LAEAKVLANRELDKYGCSDFYKRVINKAKTVEGVEALIADILAACP

SEQ ID NO: 388 - protein, 46 aa, ARTIFICIAL SEQUENCE
  Engineered albumin binding polypeptide
LAEAKVLANRELDKYGKSDFYKRVINKAKTVEGVEALIADILAAKP

SEQ ID NO: 389 - protein, 46 aa, ARTIFICIAL SEQUENCE
  Engineered albumin binding polypeptide
LAEAKVLANRELDKYGCSDFYKRLINRAKTVEGVETLIRDILAAKP

SEQ ID NO: 390 - protein, 46 aa, ARTIFICIAL SEQUENCE
  Engineered albumin binding polypeptide
LAEAKVLANRELDKYGKSDFYKRLINRAKTVEGVETLIRDILAACP

SEQ ID NO: 391 - protein, 46 aa, ARTIFICIAL SEQUENCE
  Engineered albumin binding polypeptide
LAEAKVLANRELDKYGCSDFYKRLINRAKTVEGVETLIRDILAACP

SEQ ID NO: 392 - protein, 46 aa, ARTIFICIAL SEQUENCE
  Engineered albumin binding polypeptide
LAEAKVLANRELDKYGKSDFYKRLINRAKTVEGVETLIRDILAAKP

SEQ ID NO: 393 - protein, 46 aa, ARTIFICIAL SEQUENCE
  Engineered albumin binding polypeptide
LAEAKVLANRELDKYGCSDFYKRLINRARTVEGVQTLITDILAAKP

SEQ ID NO: 394 - protein, 46 aa, ARTIFICIAL SEQUENCE
  Engineered albumin binding polypeptide
LAEAKVLANRELDKYGKSDFYKRLINRARTVEGVQTLITDILAACP

SEQ ID NO: 395 - protein, 46 aa, ARTIFICIAL SEQUENCE
  Engineered albumin binding polypeptide
LAEAKVLANRELDKYGCSDFYKRLINRARTVEGVQTLITDILAACP

SEQ ID NO: 396 - protein, 46 aa, ARTIFICIAL SEQUENCE
  Engineered albumin binding polypeptide
LAEAKVLANRELDKYGKSDFYKRLINRARTVEGVQTLITDILAAKP

SEQ ID NO: 397 - protein, 46 aa, ARTIFICIAL SEQUENCE
  Engineered albumin binding polypeptide
LAEAKVLANRELDKYGCSDYYKRLINRAKTVEGVQALIAHILAAKP

SEQ ID NO: 398 - protein, 46 aa, ARTIFICIAL SEQUENCE
  Engineered albumin binding polypeptide
LAEAKVLANRELDKYGKSDYYKRLINRAKTVEGVQALIAHILAACP

SEQ ID NO: 399 - protein, 46 aa, ARTIFICIAL SEQUENCE
  Engineered albumin binding polypeptide
LAEAKVLANRELDKYGCSDYYKRLINRAKTVEGVQALIAHILAACP

SEQ ID NO: 400 - protein, 46 aa, ARTIFICIAL SEQUENCE
  Engineered albumin binding polypeptide
LAEAKVLANRELDKYGKSDYYKRLINRAKTVEGVQALIAHILAAKP

SEQ ID NO: 401 - protein, 46 aa, ARTIFICIAL SEQUENCE
  Engineered albumin binding polypeptide
LAEAKVLANRELDKYGCSDFYKRVINRAKTVEGVNSLINHILAAKP

SEQ ID NO: 402 - protein, 46 aa, ARTIFICIAL SEQUENCE
  Engineered albumin binding polypeptide
LAEAKVLANRELDKYGKSDFYKRVINRAKTVEGVNSLINHILAACP

SEQ ID NO: 403 - protein, 46 aa, ARTIFICIAL SEQUENCE
  Engineered albumin binding polypeptide
LAEAKVLANRELDKYGCSDFYKRVINRAKTVEGVNSLINHILAACP

SEQ ID NO: 404 - protein, 46 aa, ARTIFICIAL SEQUENCE
  Engineered albumin binding polypeptide
LAEAKVLANRELDKYGKSDFYKRVINRAKTVEGVNSLINHILAAKP

SEQ ID NO: 405 - protein, 46 aa, ARTIFICIAL SEQUENCE
  Engineered albumin binding polypeptide
LAEAKVLANRELDKYGCSDFYKRLINRARTVEGVDSLIRHILAAKP

SEQ ID NO: 406 - protein, 46 aa, ARTIFICIAL SEQUENCE
  Engineered albumin binding polypeptide
LAEAKVLANRELDKYGKSDFYKRLINRARTVEGVDSLIRHILAACP

SEQ ID NO: 407 - protein, 46 aa, ARTIFICIAL SEQUENCE
  Engineered albumin binding polypeptide
LAEAKVLANRELDKYGCSDFYKRLINRARTVEGVDSLIRHILAACP

SEQ ID NO: 408 - protein, 46 aa, ARTIFICIAL SEQUENCE
  Engineered albumin binding polypeptide
LAEAKVLANRELDKYGKSDFYKRLINRARTVEGVDSLIRHILAAKP

SEQ ID NO: 409 - protein, 46 aa, ARTIFICIAL SEQUENCE
  Engineered albumin binding polypeptide
LAEAKVLANRELDKYGCSDYYKRLINKAKTVEGVEALTLHILAAKP

SEQ ID NO: 410 - protein, 46 aa, ARTIFICIAL SEQUENCE
  Engineered albumin binding polypeptide
LAEAKVLANRELDKYGKSDYYKRLINKAKTVEGVEALTLHILAACP

SEQ ID NO: 411 - protein, 46 aa, ARTIFICIAL SEQUENCE
  Engineered albumin binding polypeptide
LAEAKVLANRELDKYGCSDYYKRLINKAKTVEGVEALTLHILAACP

SEQ ID NO: 412 - protein, 46 aa, ARTIFICIAL SEQUENCE
  Engineered albumin binding polypeptide
LAEAKVLANRELDKYGKSDYYKRLINKAKTVEGVEALTLHILAAKP

SEQ ID NO: 413 - protein, 46 aa, ARTIFICIAL SEQUENCE
  Engineered albumin binding polypeptide
LAEAKVLANRELDKYGCSDFYKRLINRAKTVEGVDALIAHILAAKP

SEQ ID NO: 414 - protein, 46 aa, ARTIFICIAL SEQUENCE
  Engineered albumin binding polypeptide
LAEAKVLANRELDKYGKSDFYKRLINRAKTVEGVDALIAHILAACP

SEQ ID NO: 415 - protein, 46 aa, ARTIFICIAL SEQUENCE
  Engineered albumin binding polypeptide
LAEAKVLANRELDKYGCSDFYKRLINRAKTVEGVDALIAHILAACP

SEQ ID NO: 416 - protein, 46 aa, ARTIFICIAL SEQUENCE
  Engineered albumin binding polypeptide
LAEAKVLANRELDKYGKSDFYKRLINRAKTVEGVDALIAHILAAKP

SEQ ID NO: 417 - protein, 46 aa, ARTIFICIAL SEQUENCE
  Engineered albumin binding polypeptide
LAEAKVLANRELDKYGCSDYYKRLINKAKTVEGVQALIAHILAAKP

SEQ ID NO: 418 - protein, 46 aa, ARTIFICIAL SEQUENCE
  Engineered albumin binding polypeptide
LAEAKVLANRELDKYGKSDYYKRLINKAKTVEGVQALIAHILAACP

SEQ ID NO: 419 - protein, 46 aa, ARTIFICIAL SEQUENCE
  Engineered albumin binding polypeptide
LAEAKVLANRELDKYGCSDYYKRLINKAKTVEGVQALIAHILAACP

SEQ ID NO: 420 - protein, 46 aa, ARTIFICIAL SEQUENCE
  Engineered albumin binding polypeptide
LAEAKVLANRELDKYGKSDYYKRLINKAKTVEGVQALIAHILAAKP

SEQ ID NO: 421 - protein, 46 aa, ARTIFICIAL SEQUENCE
  Engineered albumin binding polypeptide
LAEAKVLANRELDKYGCSDFYKNLINRAKTVEGVHALKGHILAAKP

SEQ ID NO: 422 - protein, 46 aa, ARTIFICIAL SEQUENCE
  Engineered albumin binding polypeptide
LAEAKVLANRELDKYGKSDFYKNLINRAKTVEGVHALKGHILAACP

SEQ ID NO: 423 - protein, 46 aa, ARTIFICIAL SEQUENCE
  Engineered albumin binding polypeptide
LAEAKVLANRELDKYGCSDFYKNLINRAKTVEGVHALKGHILAACP

SEQ ID NO: 424 - protein, 46 aa, ARTIFICIAL SEQUENCE
  Engineered albumin binding polypeptide
LAEAKVLANRELDKYGKSDFYKNLINRAKTVEGVHALKGHILAAKP

SEQ ID NO: 425 - protein, 46 aa, ARTIFICIAL SEQUENCE
  Engineered albumin binding polypeptide
LAEAKVLANRELDKYGCSDFYKNVINRAKTVEGVHALKDHILAAKP

SEQ ID NO: 426 - protein, 46 aa, ARTIFICIAL SEQUENCE
  Engineered albumin binding polypeptide
LAEAKVLANRELDKYGKSDFYKNVINRAKTVEGVHALKDHILAACP

SEQ ID NO: 427 - protein, 46 aa, ARTIFICIAL SEQUENCE
  Engineered albumin binding polypeptide
LAEAKVLANRELDKYGCSDFYKNVINRAKTVEGVHALKDHILAACP

SEQ ID NO: 428 - protein, 46 aa, ARTIFICIAL SEQUENCE
  Engineered albumin binding polypeptide
LAEAKVLANRELDKYGKSDFYKNVINRAKTVEGVHALKDHILAAKP

SEQ ID NO: 429 - protein, 46 aa, ARTIFICIAL SEQUENCE
  Engineered albumin binding polypeptide
LAEAKVLANRELDKYGCSDFYKNVINRAKTVEGVSALKHEILAAKP

SEQ ID NO: 430 - protein, 46 aa, ARTIFICIAL SEQUENCE
  Engineered albumin binding polypeptide
LAEAKVLANRELDKYGKSDFYKNVINRAKTVEGVSALKHEILAACP

SEQ ID NO: 431 - protein, 46 aa, ARTIFICIAL SEQUENCE
  Engineered albumin binding polypeptide
LAEAKVLANRELDKYGCSDFYKNVINRAKTVEGVSALKHEILAACP

SEQ ID NO: 432 - protein, 46 aa, ARTIFICIAL SEQUENCE
  Engineered albumin binding polypeptide
LAEAKVLANRELDKYGKSDFYKNVINRAKTVEGVSALKHEILAAKP

SEQ ID NO: 433 - protein, 46 aa, ARTIFICIAL SEQUENCE
  Engineered albumin binding polypeptide
LAEAKVLANRELDKYGCSDFYKRLINRAKTVEGVNTLKADILAAKP

SEQ ID NO: 434 - protein, 46 aa, ARTIFICIAL SEQUENCE
  Engineered albumin binding polypeptide
LAEAKVLANRELDKYGKSDFYKRLINRAKTVEGVNTLKADILAACP

SEQ ID NO: 435 - protein, 46 aa, ARTIFICIAL SEQUENCE
  Engineered albumin binding polypeptide
LAEAKVLANRELDKYGCSDFYKRLINRAKTVEGVNTLKADILAACP

SEQ ID NO: 436 - protein, 46 aa, ARTIFICIAL SEQUENCE
  Engineered albumin binding polypeptide
LAEAKVLANRELDKYGKSDFYKRLINRAKTVEGVNTLKADILAAKP

SEQ ID NO: 437 - protein, 46 aa, ARTIFICIAL SEQUENCE
  Engineered albumin binding polypeptide
LAEAKVLANRELDKYGCSDFYKNLINRAKTVEGVNTLKADILAAKP

SEQ ID NO: 438 - protein, 46 aa, ARTIFICIAL SEQUENCE
  Engineered albumin binding polypeptide
LAEAKVLANRELDKYGKSDFYKNLINRAKTVEGVNTLKADILAACP

SEQ ID NO: 439 - protein, 46 aa, ARTIFICIAL SEQUENCE
  Engineered albumin binding polypeptide
LAEAKVLANRELDKYGCSDFYKNLINRAKTVEGVNTLKADILAACP

SEQ ID NO: 440 - protein, 46 aa, ARTIFICIAL SEQUENCE
  Engineered albumin binding polypeptide
LAEAKVLANRELDKYGKSDFYKNLINRAKTVEGVNTLKADILAAKP

SEQ ID NO: 441 - protein, 46 aa, ARTIFICIAL SEQUENCE
  Engineered albumin binding polypeptide
LAEAKVLANRELDKYGCSDYYKNLINRAKTVEGVNSLKSHILAAKP

SEQ ID NO: 442 - protein, 46 aa, ARTIFICIAL SEQUENCE
  Engineered albumin binding polypeptide
LAEAKVLANRELDKYGKSDYYKNLINRAKTVEGVNSLKSHILAACP

SEQ ID NO: 443 - protein, 46 aa, ARTIFICIAL SEQUENCE
  Engineered albumin binding polypeptide
LAEAKVLANRELDKYGCSDYYKNLINRAKTVEGVNSLKSHILAACP

SEQ ID NO: 444 - protein, 46 aa, ARTIFICIAL SEQUENCE
  Engineered albumin binding polypeptide
LAEAKVLANRELDKYGKSDYYKNLINRAKTVEGVNSLKSHILAAKP

SEQ ID NO: 445 - protein, 46 aa, ARTIFICIAL SEQUENCE
  Engineered albumin binding polypeptide
LAEAKVLANRELDKYGCSDFYKRLINRAKTVGGVQSLKSEILAAKP

SEQ ID NO: 446 - protein, 46 aa, ARTIFICIAL SEQUENCE
  Engineered albumin binding polypeptide
LAEAKVLANRELDKYGKSDFYKRLINRAKTVGGVQSLKSEILAACP

SEQ ID NO: 447 - protein, 46 aa, ARTIFICIAL SEQUENCE
  Engineered albumin binding polypeptide
LAEAKVLANRELDKYGCSDFYKRLINRAKTVGGVQSLKSEILAACP

SEQ ID NO: 448 - protein, 46 aa, ARTIFICIAL SEQUENCE
  Engineered albumin binding polypeptide
LAEAKVLANRELDKYGKSDFYKRLINRAKTVGGVQSLKSEILAAKP

SEQ ID NO: 449 - protein, 46 aa, ARTIFICIAL SEQUENCE
  Engineered albumin binding polypeptide
LAEAKVLANRELDKYGCSDFYKNVINRAKTVEGVDSLKAEILAAKP

SEQ ID NO: 450 - protein, 46 aa, ARTIFICIAL SEQUENCE
  Engineered albumin binding polypeptide
LAEAKVLANRELDKYGKSDFYKNVINRAKTVEGVDSLKAEILAACP

SEQ ID NO: 451 - protein, 46 aa, ARTIFICIAL SEQUENCE
  Engineered albumin binding polypeptide
LAEAKVLANRELDKYGCSDFYKNVINRAKTVEGVDSLKAEILAACP

SEQ ID NO: 452 - protein, 46 aa, ARTIFICIAL SEQUENCE
  Engineered albumin binding polypeptide
LAEAKVLANRELDKYGKSDFYKNVINRAKTVEGVDSLKAEILAAKP

SEQ ID NO: 453 - protein, 46 aa, ARTIFICIAL SEQUENCE
  Engineered albumin binding polypeptide
LAEAKVLANRELDKYGCSDFYKNLINRARTVEGVQTLKSDILAAKP

SEQ ID NO: 454 - protein, 46 aa, ARTIFICIAL SEQUENCE
  Engineered albumin binding polypeptide
LAEAKVLANRELDKYGKSDFYKNLINRARTVEGVQTLKSDILAACP

SEQ ID NO: 455 - protein, 46 aa, ARTIFICIAL SEQUENCE
  Engineered albumin binding polypeptide
LAEAKVLANRELDKYGCSDFYKNLINRARTVEGVQTLKSDILAACP

SEQ ID NO: 456 - protein, 46 aa, ARTIFICIAL SEQUENCE
  Engineered albumin binding polypeptide
LAEAKVLANRELDKYGKSDFYKNLINRARTVEGVQTLKSDILAAKP

SEQ ID NO: 457 - protein, 46 aa, ARTIFICIAL SEQUENCE
  Engineered albumin binding polypeptide
LAEAKVLANRELDKYGCSDFYKKFINKAKTVEGVETLKSEILAAKP

SEQ ID NO: 458 - protein, 46 aa, ARTIFICIAL SEQUENCE
  Engineered albumin binding polypeptide
LAEAKVLANRELDKYGKSDFYKKFINKAKTVEGVETLKSEILAACP

SEQ ID NO: 459 - protein, 46 aa, ARTIFICIAL SEQUENCE
  Engineered albumin binding polypeptide
LAEAKVLANRELDKYGCSDFYKKFINKAKTVEGVETLKSEILAACP

SEQ ID NO: 460 - protein, 46 aa, ARTIFICIAL SEQUENCE
  Engineered albumin binding polypeptide
LAEAKVLANRELDKYGKSDFYKKFINKAKTVEGVETLKSEILAAKP

SEQ ID NO: 461 - protein, 46 aa, ARTIFICIAL SEQUENCE
  Engineered albumin binding polypeptide
LAEAKVLANRELDKYGCSDFYKSLINRAKTVEGVHSLKDEILAAKP

SEQ ID NO: 462 - protein, 46 aa, ARTIFICIAL SEQUENCE
  Engineered albumin binding polypeptide
LAEAKVLANRELDKYGKSDFYKSLINRAKTVEGVHSLKDEILAACP

SEQ ID NO: 463 - protein, 46 aa, ARTIFICIAL SEQUENCE
  Engineered albumin binding polypeptide
LAEAKVLANRELDKYGCSDFYKSLINRAKTVEGVHSLKDEILAACP

SEQ ID NO: 464 - protein, 46 aa, ARTIFICIAL SEQUENCE
  Engineered albumin binding polypeptide
LAEAKVLANRELDKYGKSDFYKSLINRAKTVEGVHSLKDEILAAKP

SEQ ID NO: 465 - protein, 46 aa, ARTIFICIAL SEQUENCE
  Engineered albumin binding polypeptide
LAEAKVLANRELDKYGCSDYYKNVINKAKTVEGVSSLKAEILAAKP

SEQ ID NO: 466 - protein, 46 aa, ARTIFICIAL SEQUENCE
  Engineered albumin binding polypeptide
LAEAKVLANRELDKYGKSDYYKNVINKAKTVEGVSSLKAEILAACP

SEQ ID NO: 467 - protein, 46 aa, ARTIFICIAL SEQUENCE
  Engineered albumin binding polypeptide
LAEAKVLANRELDKYGCSDYYKNVINKAKTVEGVSSLKAEILAACP

SEQ ID NO: 468 - protein, 46 aa, ARTIFICIAL SEQUENCE
  Engineered albumin binding polypeptide
LAEAKVLANRELDKYGKSDYYKNVINKAKTVEGVSSLKAEILAAKP

SEQ ID NO: 469 - protein, 46 aa, ARTIFICIAL SEQUENCE
  Engineered albumin binding polypeptide
LAEAKVLANRELDKYGCSDFYKSLINRAKTVEGVDALKSHILAAKP

SEQ ID NO: 470 - protein, 46 aa, ARTIFICIAL SEQUENCE
  Engineered albumin binding polypeptide
LAEAKVLANRELDKYGKSDFYKSLINRAKTVEGVDALKSHILAACP

SEQ ID NO: 471 - protein, 46 aa, ARTIFICIAL SEQUENCE
  Engineered albumin binding polypeptide
LAEAKVLANRELDKYGCSDFYKSLINRAKTVEGVDALKSHILAACP

SEQ ID NO: 472 - protein, 46 aa, ARTIFICIAL SEQUENCE
  Engineered albumin binding polypeptide
LAEAKVLANRELDKYGKSDFYKSLINRAKTVEGVDALKSHILAAKP

SEQ ID NO: 473 - protein, 46 aa, ARTIFICIAL SEQUENCE
  Engineered albumin binding polypeptide
LAEAKVLANRELDKYGCSDFYKNLINKAKTVEGVSTLKHDILAAKP

SEQ ID NO: 474 - protein, 46 aa, ARTIFICIAL SEQUENCE
  Engineered albumin binding polypeptide
LAEAKVLANRELDKYGKSDFYKNLINKAKTVEGVSTLKHDILAACP

SEQ ID NO: 475 - protein, 46 aa, ARTIFICIAL SEQUENCE
  Engineered albumin binding polypeptide
LAEAKVLANRELDKYGCSDFYKNLINKAKTVEGVSTLKHDILAACP

SEQ ID NO: 476 - protein, 46 aa, ARTIFICIAL SEQUENCE
  Engineered albumin binding polypeptide
LAEAKVLANRELDKYGKSDFYKNLINKAKTVEGVSTLKHDILAAKP

SEQ ID NO: 477 - protein, 46 aa, ARTIFICIAL SEQUENCE
  Engineered albumin binding polypeptide
LAEAKVLANRELDKYGCSDFYKNLINRAKTVEGVSTLKHDILAAKP

SEQ ID NO: 478 - protein, 46 aa, ARTIFICIAL SEQUENCE
  Engineered albumin binding polypeptide
LAEAKVLANRELDKYGKSDFYKNLINRAKTVEGVSTLKHDILAACP

SEQ ID NO: 479 - protein, 46 aa, ARTIFICIAL SEQUENCE
  Engineered albumin binding polypeptide
LAEAKVLANRELDKYGCSDFYKNLINRAKTVEGVSTLKHDILAACP

SEQ ID NO: 480 - protein, 46 aa, ARTIFICIAL SEQUENCE
  Engineered albumin binding polypeptide
LAEAKVLANRELDKYGKSDFYKNLINRAKTVEGVSTLKHDILAAKP

SEQ ID NO: 481 - protein, 46 aa, ARTIFICIAL SEQUENCE
  Engineered albumin binding polypeptide
LAEAKVLANRELDKYGCSDFYKNLINRAKTVEGVQALKSEILAAKP

SEQ ID NO: 482 - protein, 46 aa, ARTIFICIAL SEQUENCE
  Engineered albumin binding polypeptide
LAEAKVLANRELDKYGKSDFYKNLINRAKTVEGVQALKSEILAACP

SEQ ID NO: 483 - protein, 46 aa, ARTIFICIAL SEQUENCE
  Engineered albumin binding polypeptide
LAEAKVLANRELDKYGCSDFYKNLINRAKTVEGVQALKSEILAACP

SEQ ID NO: 484 - protein, 46 aa, ARTIFICIAL SEQUENCE
  Engineered albumin binding polypeptide
LAEAKVLANRELDKYGKSDFYKNLINRAKTVEGVQALKSEILAAKP

SEQ ID NO: 485 - protein, 46 aa, ARTIFICIAL SEQUENCE
  Engineered albumin binding polypeptide
LAEAKVLANRELDKYGCSDYYKSLINKAKTVEGVDSLKVHILAAKP

SEQ ID NO: 486 - protein, 46 aa, ARTIFICIAL SEQUENCE
  Engineered albumin binding polypeptide
LAEAKVLANRELDKYGKSDYYKSLINKAKTVEGVDSLKVHILAACP

SEQ ID NO: 487 - protein, 46 aa, ARTIFICIAL SEQUENCE
  Engineered albumin binding polypeptide
LAEAKVLANRELDKYGCSDYYKSLINKAKTVEGVDSLKVHILAACP

SEQ ID NO: 488 - protein, 46 aa, ARTIFICIAL SEQUENCE
  Engineered albumin binding polypeptide
LAEAKVLANRELDKYGKSDYYKSLINKAKTVEGVDSLKVHILAAKP

SEQ ID NO: 489 - protein, 46 aa, ARTIFICIAL SEQUENCE
  Engineered albumin binding polypeptide
LAEAKVLANRELDKYGCSDFYKNLINRAKTVEGVQSLKTEILAAKP

SEQ ID NO: 490 - protein, 46 aa, ARTIFICIAL SEQUENCE
  Engineered albumin binding polypeptide
LAEAKVLANRELDKYGKSDFYKNLINRAKTVEGVQSLKTEILAACP

SEQ ID NO: 491 - protein, 46 aa, ARTIFICIAL SEQUENCE
  Engineered albumin binding polypeptide
LAEAKVLANRELDKYGCSDFYKNLINRAKTVEGVQSLKTEILAACP

SEQ ID NO: 492 - protein, 46 aa, ARTIFICIAL SEQUENCE
  Engineered albumin binding polypeptide
LAEAKVLANRELDKYGKSDFYKNLINRAKTVEGVQSLKTEILAAKP

SEQ ID NO: 493 - protein, 46 aa, ARTIFICIAL SEQUENCE
  Engineered albumin binding polypeptide
LAEAKVLANRELDKYGCSDYYKNLINRAKTVEGVDALKTHILAAKP

SEQ ID NO: 494 - protein, 46 aa, ARTIFICIAL SEQUENCE
  Engineered albumin binding polypeptide
LAEAKVLANRELDKYGKSDYYKNLINRAKTVEGVDALKTHILAACP

SEQ ID NO: 495 - protein, 46 aa, ARTIFICIAL SEQUENCE
  Engineered albumin binding polypeptide
LAEAKVLANRELDKYGCSDYYKNLINRAKTVEGVDALKTHILAACP

SEQ ID NO: 496 - protein, 46 aa, ARTIFICIAL SEQUENCE
  Engineered albumin binding polypeptide
LAEAKVLANRELDKYGKSDYYKNLINRAKTVEGVDALKTHILAAKP

SEQ ID NO: 497 - protein, 46 aa, ARTIFICIAL SEQUENCE
  Engineered albumin binding polypeptide
LAEAKVLANRELDKYGCSDFYKSMINRAKTVEGVDSLKTHILAAKP

SEQ ID NO: 498 - protein, 46 aa, ARTIFICIAL SEQUENCE
  Engineered albumin binding polypeptide
LAEAKVLANRELDKYGKSDFYKSMINRAKTVEGVDSLKTHILAACP

SEQ ID NO: 499 - protein, 46 aa, ARTIFICIAL SEQUENCE
  Engineered albumin binding polypeptide
LAEAKVLANRELDKYGCSDFYKSMINRAKTVEGVDSLKTHILAACP

SEQ ID NO: 500 - protein, 46 aa, ARTIFICIAL SEQUENCE
  Engineered albumin binding polypeptide
LAEAKVLANRELDKYGKSDFYKSMINRAKTVEGVDSLKTHILAAKP

SEQ ID NO: 501 - protein, 46 aa, ARTIFICIAL SEQUENCE
  Engineered albumin binding polypeptide
LAEAKVLANRELDKYGCSDFYKNLINRAKTVEGVTTLKTDILAAKP

SEQ ID NO: 502 - protein, 46 aa, ARTIFICIAL SEQUENCE
  Engineered albumin binding polypeptide
LAEAKVLANRELDKYGKSDFYKNLINRAKTVEGVTTLKTDILAACP

SEQ ID NO: 503 - protein, 46 aa, ARTIFICIAL SEQUENCE
  Engineered albumin binding polypeptide
LAEAKVLANRELDKYGCSDFYKNLINRAKTVEGVTTLKTDILAACP

SEQ ID NO: 504 - protein, 46 aa, ARTIFICIAL SEQUENCE
  Engineered albumin binding polypeptide
LAEAKVLANRELDKYGKSDFYKNLINRAKTVEGVTTLKTDILAAKP

SEQ ID NO: 505 - protein, 46 aa, ARTIFICIAL SEQUENCE
  Engineered albumin binding polypeptide
LAEAKVLANRELDKYGCSDFYKNLINRAKTVEGVESLKDHILAAKP

SEQ ID NO: 506 - protein, 46 aa, ARTIFICIAL SEQUENCE
  Engineered albumin binding polypeptide
LAEAKVLANRELDKYGKSDFYKNLINRAKTVEGVESLKDHILAACP

SEQ ID NO: 507 - protein, 46 aa, ARTIFICIAL SEQUENCE
  Engineered albumin binding polypeptide
LAEAKVLANRELDKYGCSDFYKNLINRAKTVEGVESLKDHILAACP

SEQ ID NO: 508 - protein, 46 aa, ARTIFICIAL SEQUENCE
  Engineered albumin binding polypeptide
LAEAKVLANRELDKYGKSDFYKNLINRAKTVEGVESLKDHILAAKP

SEQ ID NO: 509 - protein, 46 aa, ARTIFICIAL SEQUENCE
  Engineered albumin binding polypeptide
LAEAKVLANRELDKYGCSDFYKSYINRAKTVEGVHTLKGHILAAKP

SEQ ID NO: 510 - protein, 46 aa, ARTIFICIAL SEQUENCE
  Engineered albumin binding polypeptide
LAEAKVLANRELDKYGKSDFYKSYINRAKTVEGVHTLKGHILAACP

SEQ ID NO: 511 - protein, 46 aa, ARTIFICIAL SEQUENCE
  Engineered albumin binding polypeptide
LAEAKVLANRELDKYGCSDFYKSYINRAKTVEGVHTLKGHILAACP

SEQ ID NO: 512 - protein, 46 aa, ARTIFICIAL SEQUENCE
  Engineered albumin binding polypeptide
LAEAKVLANRELDKYGKSDFYKSYINRAKTVEGVHTLKGHILAAKP

SEQ ID NO: 513 - protein, 46 aa, ARTIFICIAL SEQUENCE
  Engineered albumin binding polypeptide
LAEAKVLANRELDKYGCSDFYKNLINRAKTVEGVQTLKSDILAAKP

SEQ ID NO: 514 - protein, 46 aa, ARTIFICIAL SEQUENCE
  Engineered albumin binding polypeptide
LAEAKVLANRELDKYGKSDFYKNLINRAKTVEGVQTLKSDILAACP

SEQ ID NO: 515 - protein, 46 aa, ARTIFICIAL SEQUENCE
  Engineered albumin binding polypeptide
LAEAKVLANRELDKYGCSDFYKNLINRAKTVEGVQTLKSDILAACP

SEQ ID NO: 516 - protein, 46 aa, ARTIFICIAL SEQUENCE
  Engineered albumin binding polypeptide
LAEAKVLANRELDKYGKSDFYKNLINRAKTVEGVQTLKSDILAAKP

SEQ ID NO: 517 - protein, 46 aa, ARTIFICIAL SEQUENCE
  Engineered albumin binding polypeptide
LAEAKVLANRELDKYGCSDFYKNLINRAKTVEGVNSLKSHILAAKP

SEQ ID NO: 518 - protein, 46 aa, ARTIFICIAL SEQUENCE
  Engineered albumin binding polypeptide
LAEAKVLANRELDKYGKSDFYKNLINRAKTVEGVNSLKSHILAACP

SEQ ID NO: 519 - protein, 46 aa, ARTIFICIAL SEQUENCE
  Engineered albumin binding polypeptide
LAEAKVLANRELDKYGCSDFYKNLINRAKTVEGVNSLKSHILAACP

SEQ ID NO: 520 - protein, 46 aa, ARTIFICIAL SEQUENCE
  Engineered albumin binding polypeptide
LAEAKVLANRELDKYGKSDFYKNLINRAKTVEGVNSLKSHILAAKP

SEQ ID NO: 521 - protein, 46 aa, ARTIFICIAL SEQUENCE
  Engineered albumin binding polypeptide
LAEAKVLANRELDKYGCSDFYKNLINRAKTVEGVNTLKHDILAAKP

SEQ ID NO: 522 - protein, 46 aa, ARTIFICIAL SEQUENCE
  Engineered albumin binding polypeptide
LAEAKVLANRELDKYGKSDFYKNLINRAKTVEGVNTLKHDILAACP

SEQ ID NO: 523 - protein, 46 aa, ARTIFICIAL SEQUENCE
  Engineered albumin binding polypeptide
LAEAKVLANRELDKYGCSDFYKNLINRAKTVEGVNTLKHDILAACP

SEQ ID NO: 524 - protein, 46 aa, ARTIFICIAL SEQUENCE
  Engineered albumin binding polypeptide
LAEAKVLANRELDKYGKSDFYKNLINRAKTVEGVNTLKHDILAAKP

SEQ ID NO: 525 - protein, 46 aa, ARTIFICIAL SEQUENCE
  Engineered albumin binding polypeptide
LAEAKVLANRELDKYGCSDFYKNLINRAKTVEGVESLKGEILAAKP

SEQ ID NO: 526 - protein, 46 aa, ARTIFICIAL SEQUENCE
  Engineered albumin binding polypeptide
LAEAKVLANRELDKYGKSDFYKNLINRAKTVEGVESLKGEILAACP

SEQ ID NO: 527 - protein, 46 aa, ARTIFICIAL SEQUENCE
  Engineered albumin binding polypeptide
LAEAKVLANRELDKYGCSDFYKNLINRAKTVEGVESLKGEILAACP

SEQ ID NO: 528 - protein, 46 aa, ARTIFICIAL SEQUENCE
  Engineered albumin binding polypeptide
LAEAKVLANRELDKYGKSDFYKNLINRAKTVEGVESLKGEILAAKP

SEQ ID NO: 529 - protein, 46 aa, ARTIFICIAL SEQUENCE
  Engineered albumin binding polypeptide
LAEAKVLANRELDKYGCSDFYKNLINKAKTVEGVHTLKHDILAAKP

SEQ ID NO: 530 - protein, 46 aa, ARTIFICIAL SEQUENCE
  Engineered albumin binding polypeptide
LAEAKVLANRELDKYGKSDFYKNLINKAKTVEGVHTLKHDILAACP

SEQ ID NO: 531 - protein, 46 aa, ARTIFICIAL SEQUENCE
  Engineered albumin binding polypeptide
LAEAKVLANRELDKYGCSDFYKNLINKAKTVEGVHTLKHDILAACP

SEQ ID NO: 532 - protein, 46 aa, ARTIFICIAL SEQUENCE
  Engineered albumin binding polypeptide
LAEAKVLANRELDKYGKSDFYKNLINKAKTVEGVHTLKHDILAAKP

SEQ ID NO: 533 - protein, 46 aa, ARTIFICIAL SEQUENCE
  Engineered albumin binding polypeptide
LAEAKVLANRELDKYGCSDFYKNLINKAKTVEGVDALKVHILAAKP

SEQ ID NO: 534 - protein, 46 aa, ARTIFICIAL SEQUENCE
  Engineered albumin binding polypeptide
LAEAKVLANRELDKYGKSDFYKNLINKAKTVEGVDALKVHILAACP

SEQ ID NO: 535 - protein, 46 aa, ARTIFICIAL SEQUENCE
  Engineered albumin binding polypeptide
LAEAKVLANRELDKYGCSDFYKNLINKAKTVEGVDALKVHILAACP

SEQ ID NO: 536 - protein, 46 aa, ARTIFICIAL SEQUENCE
  Engineered albumin binding polypeptide
LAEAKVLANRELDKYGKSDFYKNLINKAKTVEGVDALKVHILAAKP

SEQ ID NO: 537 - protein, 46 aa, ARTIFICIAL SEQUENCE
  Engineered albumin binding polypeptide
LAEAKVLANRELDKYGCSDYYKRLINRAKTVEGVHALKAEILAAKP

SEQ ID NO: 538 - protein, 46 aa, ARTIFICIAL SEQUENCE
  Engineered albumin binding polypeptide
LAEAKVLANRELDKYGKSDYYKRLINRAKTVEGVHALKAEILAACP

SEQ ID NO: 539 - protein, 46 aa, ARTIFICIAL SEQUENCE
  Engineered albumin binding polypeptide
LAEAKVLANRELDKYGCSDYYKRLINRAKTVEGVHALKAEILAACP

SEQ ID NO: 540 - protein, 46 aa, ARTIFICIAL SEQUENCE
  Engineered albumin binding polypeptide
LAEAKVLANRELDKYGKSDYYKRLINRAKTVEGVHALKAEILAAKP

SEQ ID NO: 541 - protein, 46 aa, ARTIFICIAL SEQUENCE
  Engineered albumin binding polypeptide
LAEAKVLANRELDKYGCSDYYKNLINRARTVEGVDTLKHDILAAKP

SEQ ID NO: 542 - protein, 46 aa, ARTIFICIAL SEQUENCE
  Engineered albumin binding polypeptide
LAEAKVLANRELDKYGKSDYYKNLINRARTVEGVDTLKHDILAACP

SEQ ID NO: 543 - protein, 46 aa, ARTIFICIAL SEQUENCE
  Engineered albumin binding polypeptide
LAEAKVLANRELDKYGCSDYYKNLINRARTVEGVDTLKHDILAACP

SEQ ID NO: 544 - protein, 46 aa, ARTIFICIAL SEQUENCE
  Engineered albumin binding polypeptide
LAEAKVLANRELDKYGKSDYYKNLINRARTVEGVDTLKHDILAAKP

SEQ ID NO: 545 - protein, 46 aa, ARTIFICIAL SEQUENCE
  Engineered albumin binding polypeptide
LAEAKVLANRELDKYGCSDFYKKVINRARTVEGVQALKADILAAKP

SEQ ID NO: 546 - protein, 46 aa, ARTIFICIAL SEQUENCE
  Engineered albumin binding polypeptide
LAEAKVLANRELDKYGKSDFYKKVINRARTVEGVQALKADILAACP

SEQ ID NO: 547 - protein, 46 aa, ARTIFICIAL SEQUENCE
  Engineered albumin binding polypeptide
LAEAKVLANRELDKYGCSDFYKKVINRARTVEGVQALKADILAACP

SEQ ID NO: 548 - protein, 46 aa, ARTIFICIAL SEQUENCE
  Engineered albumin binding polypeptide
LAEAKVLANRELDKYGKSDFYKKVINRARTVEGVQALKADILAAKP

SEQ ID NO: 549 - protein, 46 aa, ARTIFICIAL SEQUENCE
  Engineered albumin binding polypeptide
LAEAKVLANRELDKYGCSDFYKNLINRAKTVEGVESLKADILAAKP

SEQ ID NO: 550 - protein, 46 aa, ARTIFICIAL SEQUENCE
  Engineered albumin binding polypeptide
LAEAKVLANRELDKYGKSDFYKNLINRAKTVEGVESLKADILAACP

SEQ ID NO: 551 - protein, 46 aa, ARTIFICIAL SEQUENCE
  Engineered albumin binding polypeptide
LAEAKVLANRELDKYGCSDFYKNLINRAKTVEGVESLKADILAACP

SEQ ID NO: 552 - protein, 46 aa, ARTIFICIAL SEQUENCE
  Engineered albumin binding polypeptide
LAEAKVLANRELDKYGKSDFYKNLINRAKTVEGVESLKADILAAKP

SEQ ID NO: 553 - protein, 46 aa, ARTIFICIAL SEQUENCE
  Engineered albumin binding polypeptide
LAEAKVLANRELDKYGCSDYYKNLINKAKTVEGVDALKAHILAAKP

SEQ ID NO: 554 - protein, 46 aa, ARTIFICIAL SEQUENCE
  Engineered albumin binding polypeptide
LAEAKVLANRELDKYGKSDYYKNLINKAKTVEGVDALKAHILAACP

SEQ ID NO: 555 - protein, 46 aa, ARTIFICIAL SEQUENCE
  Engineered albumin binding polypeptide
LAEAKVLANRELDKYGCSDYYKNLINKAKTVEGVDALKAHILAACP

SEQ ID NO: 556 - protein, 46 aa, ARTIFICIAL SEQUENCE
  Engineered albumin binding polypeptide
LAEAKVLANRELDKYGKSDYYKNLINKAKTVEGVDALKAHILAAKP

SEQ ID NO: 557 - protein, 46 aa, ARTIFICIAL SEQUENCE
  Engineered albumin binding polypeptide
LAEAKVLANRELDKYGCSDYYKNLINRAKTVEGVESLKTHILAAKP

SEQ ID NO: 558 - protein, 46 aa, ARTIFICIAL SEQUENCE
  Engineered albumin binding polypeptide
LAEAKVLANRELDKYGKSDYYKNLINRAKTVEGVESLKTHILAACP

SEQ ID NO: 559 - protein, 46 aa, ARTIFICIAL SEQUENCE
  Engineered albumin binding polypeptide
LAEAKVLANRELDKYGCSDYYKNLINRAKTVEGVESLKTHILAACP

SEQ ID NO: 560 - protein, 46 aa, ARTIFICIAL SEQUENCE
  Engineered albumin binding polypeptide
LAEAKVLANRELDKYGKSDYYKNLINRAKTVEGVESLKTHILAAKP

SEQ ID NO: 561 - protein, 46 aa, ARTIFICIAL SEQUENCE
  Engineered albumin binding polypeptide
LAEAKVLANRELDKYGCSDFYKNLINRARTVEGVDSLKVEILAAKP

SEQ ID NO: 562 - protein, 46 aa, ARTIFICIAL SEQUENCE
  Engineered albumin binding polypeptide
LAEAKVLANRELDKYGKSDFYKNLINRARTVEGVDSLKVEILAACP

SEQ ID NO: 563 - protein, 46 aa, ARTIFICIAL SEQUENCE
  Engineered albumin binding polypeptide
LAEAKVLANRELDKYGCSDFYKNLINRARTVEGVDSLKVEILAACP

SEQ ID NO: 564 - protein, 46 aa, ARTIFICIAL SEQUENCE
  Engineered albumin binding polypeptide
LAEAKVLANRELDKYGKSDFYKNLINRARTVEGVDSLKVEILAAKP

SEQ ID NO: 565 - protein, 46 aa, ARTIFICIAL SEQUENCE
  Engineered albumin binding polypeptide
LAEAKVLANRELDKYGCSDFYKNVINRAKTVEGVSALKREILAAKP

SEQ ID NO: 566 - protein, 46 aa, ARTIFICIAL SEQUENCE
  Engineered albumin binding polypeptide
LAEAKVLANRELDKYGKSDFYKNVINRAKTVEGVSALKREILAACP

SEQ ID NO: 567 - protein, 46 aa, ARTIFICIAL SEQUENCE
  Engineered albumin binding polypeptide
LAEAKVLANRELDKYGCSDFYKNVINRAKTVEGVSALKREILAACP

SEQ ID NO: 568 - protein, 46 aa, ARTIFICIAL SEQUENCE
  Engineered albumin binding polypeptide
LAEAKVLANRELDKYGKSDFYKNVINRAKTVEGVSALKREILAAKP

SEQ ID NO: 569 - protein, 46 aa, ARTIFICIAL SEQUENCE
  Engineered albumin binding polypeptide
LAEAKVLANRELDKYGCSDFYKNLINRAKTVEGVNALKSDILAAKP

SEQ ID NO: 570 - protein, 46 aa, ARTIFICIAL SEQUENCE
  Engineered albumin binding polypeptide
LAEAKVLANRELDKYGKSDFYKNLINRAKTVEGVNALKSDILAACP

SEQ ID NO: 571 - protein, 46 aa, ARTIFICIAL SEQUENCE
  Engineered albumin binding polypeptide
LAEAKVLANRELDKYGCSDFYKNLINRAKTVEGVNALKSDILAACP

SEQ ID NO: 572 - protein, 46 aa, ARTIFICIAL SEQUENCE
  Engineered albumin binding polypeptide
LAEAKVLANRELDKYGKSDFYKNLINRAKTVEGVNALKSDILAAKP

SEQ ID NO: 573 - protein, 46 aa, ARTIFICIAL SEQUENCE
  Engineered albumin binding polypeptide
LAEAKVLANRELDKYGCSDFYKNLINRAKTVEGVSALKQEILAAKP

SEQ ID NO: 574 - protein, 46 aa, ARTIFICIAL SEQUENCE
  Engineered albumin binding polypeptide
LAEAKVLANRELDKYGKSDFYKNLINRAKTVEGVSALKQEILAACP

SEQ ID NO: 575 - protein, 46 aa, ARTIFICIAL SEQUENCE
  Engineered albumin binding polypeptide
LAEAKVLANRELDKYGCSDFYKNLINRAKTVEGVSALKQEILAACP

SEQ ID NO: 576 - protein, 46 aa, ARTIFICIAL SEQUENCE
  Engineered albumin binding polypeptide
LAEAKVLANRELDKYGKSDFYKNLINRAKTVEGVSALKQEILAAKP

SEQ ID NO: 577 - protein, 46 aa, ARTIFICIAL SEQUENCE
  Engineered albumin binding polypeptide
LAEAKVLANRELDKYGCSDFYKNLINRAKTVEGVQSLKDHILAAKP

SEQ ID NO: 578 - protein, 46 aa, ARTIFICIAL SEQUENCE
  Engineered albumin binding polypeptide
LAEAKVLANRELDKYGKSDFYKNLINRAKTVEGVQSLKDHILAACP

SEQ ID NO: 579 - protein, 46 aa, ARTIFICIAL SEQUENCE
  Engineered albumin binding polypeptide
LAEAKVLANRELDKYGCSDFYKNLINRAKTVEGVQSLKDHILAACP

SEQ ID NO: 580 - protein, 46 aa, ARTIFICIAL SEQUENCE
  Engineered albumin binding polypeptide
LAEAKVLANRELDKYGKSDFYKNLINRAKTVEGVQSLKDHILAAKP

SEQ ID NO: 581 - protein, 46 aa, ARTIFICIAL SEQUENCE
  Engineered albumin binding polypeptide
LAEAKVLANRELDKYGCSDFYKNLINRAKTVEGVDALKCHILAAKP

SEQ ID NO: 582 - protein, 46 aa, ARTIFICIAL SEQUENCE
  Engineered albumin binding polypeptide
LAEAKVLANRELDKYGKSDFYKNLINRAKTVEGVDALKCHILAACP

SEQ ID NO: 583 - protein, 46 aa, ARTIFICIAL SEQUENCE
  Engineered albumin binding polypeptide
LAEAKVLANRELDKYGCSDFYKNLINRAKTVEGVDALKCHILAACP

SEQ ID NO: 584 - protein, 46 aa, ARTIFICIAL SEQUENCE
  Engineered albumin binding polypeptide
LAEAKVLANRELDKYGKSDFYKNLINRAKTVEGVDALKCHILAAKP

SEQ ID NO: 585 - protein, 46 aa, ARTIFICIAL SEQUENCE
  Engineered albumin binding polypeptide
LAEAKVLANRELDKYGCSDYYKRLINKAKTVEGVNALKTHILAAKP

SEQ ID NO: 586 - protein, 46 aa, ARTIFICIAL SEQUENCE
  Engineered albumin binding polypeptide
LAEAKVLANRELDKYGKSDYYKRLINKAKTVEGVNALKTHILAACP

SEQ ID NO: 587 - protein, 46 aa, ARTIFICIAL SEQUENCE
  Engineered albumin binding polypeptide
LAEAKVLANRELDKYGCSDYYKRLINKAKTVEGVNALKTHILAACP

SEQ ID NO: 588 - protein, 46 aa, ARTIFICIAL SEQUENCE
  Engineered albumin binding polypeptide
LAEAKVLANRELDKYGKSDYYKRLINKAKTVEGVNALKTHILAAKP

SEQ ID NO: 589 - protein, 46 aa, ARTIFICIAL SEQUENCE
  Engineered albumin binding polypeptide
LAEAKVLANRELDKYGCSDFYKNVINKAKTVEGVEALKADILAAKP

SEQ ID NO: 590 - protein, 46 aa, ARTIFICIAL SEQUENCE
  Engineered albumin binding polypeptide
LAEAKVLANRELDKYGKSDFYKNVINKAKTVEGVEALKADILAACP

SEQ ID NO: 591 - protein, 46 aa, ARTIFICIAL SEQUENCE
  Engineered albumin binding polypeptide
LAEAKVLANRELDKYGCSDFYKNVINKAKTVEGVEALKADILAACP

SEQ ID NO: 592 - protein, 46 aa, ARTIFICIAL SEQUENCE
  Engineered albumin binding polypeptide
LAEAKVLANRELDKYGKSDFYKNVINKAKTVEGVEALKADILAAKP

SEQ ID NO: 593 - protein, 46 aa, ARTIFICIAL SEQUENCE
  Engineered albumin binding polypeptide
LAEAKVLANRELDKYGCSDFYKNLINRAKTVEGVETLKRDILAAKP

SEQ ID NO: 594 - protein, 46 aa, ARTIFICIAL SEQUENCE
  Engineered albumin binding polypeptide
LAEAKVLANRELDKYGKSDFYKNLINRAKTVEGVETLKRDILAACP

SEQ ID NO: 595 - protein, 46 aa, ARTIFICIAL SEQUENCE
  Engineered albumin binding polypeptide
LAEAKVLANRELDKYGCSDFYKNLINRAKTVEGVETLKRDILAACP

SEQ ID NO: 596 - protein, 46 aa, ARTIFICIAL SEQUENCE
  Engineered albumin binding polypeptide
LAEAKVLANRELDKYGKSDFYKNLINRAKTVEGVETLKRDILAAKP

SEQ ID NO: 597 - protein, 46 aa, ARTIFICIAL SEQUENCE
  Engineered albumin binding polypeptide
LAEAKVLANRELDKYGCSDFYKNLINRARTVEGVQTLKTDILAAKP

SEQ ID NO: 598 - protein, 46 aa, ARTIFICIAL SEQUENCE
  Engineered albumin binding polypeptide
LAEAKVLANRELDKYGKSDFYKNLINRARTVEGVQTLKTDILAACP

SEQ ID NO: 599 - protein, 46 aa, ARTIFICIAL SEQUENCE
  Engineered albumin binding polypeptide
LAEAKVLANRELDKYGCSDFYKNLINRARTVEGVQTLKTDILAACP

SEQ ID NO: 600 - protein, 46 aa, ARTIFICIAL SEQUENCE
  Engineered albumin binding polypeptide
LAEAKVLANRELDKYGKSDFYKNLINRARTVEGVQTLKTDILAAKP

SEQ ID NO: 601 - protein, 46 aa, ARTIFICIAL SEQUENCE
  Engineered albumin binding polypeptide
LAEAKVLANRELDKYGCSDFYKRLINKAKTVEGVNALKHHILAAKP

SEQ ID NO: 602 - protein, 46 aa, ARTIFICIAL SEQUENCE
  Engineered albumin binding polypeptide
LAEAKVLANRELDKYGKSDFYKRLINKAKTVEGVNALKHHILAACP

SEQ ID NO: 603 - protein, 46 aa, ARTIFICIAL SEQUENCE
  Engineered albumin binding polypeptide
LAEAKVLANRELDKYGCSDFYKRLINKAKTVEGVNALKHHILAACP

SEQ ID NO: 604 - protein, 46 aa, ARTIFICIAL SEQUENCE
  Engineered albumin binding polypeptide
LAEAKVLANRELDKYGKSDFYKRLINKAKTVEGVNALKHHILAAKP

SEQ ID NO: 605 - protein, 46 aa, ARTIFICIAL SEQUENCE
  Engineered albumin binding polypeptide
LAEAKVLANRELDKYGCSDYYKNLINRAKTVEGVQALKAHILAAKP

SEQ ID NO: 606 - protein, 46 aa, ARTIFICIAL SEQUENCE
  Engineered albumin binding polypeptide
LAEAKVLANRELDKYGKSDYYKNLINRAKTVEGVQALKAHILAACP

SEQ ID NO: 607 - protein, 46 aa, ARTIFICIAL SEQUENCE
  Engineered albumin binding polypeptide
LAEAKVLANRELDKYGCSDYYKNLINRAKTVEGVQALKAHILAACP

SEQ ID NO: 608 - protein, 46 aa, ARTIFICIAL SEQUENCE
  Engineered albumin binding polypeptide
LAEAKVLANRELDKYGKSDYYKNLINRAKTVEGVQALKAHILAAKP

SEQ ID NO: 609 - protein, 46 aa, ARTIFICIAL SEQUENCE
  Engineered albumin binding polypeptide
LAEAKVLANRELDKYGCSDFYKNVINRAKTVEGVNSLKNHILAAKP

SEQ ID NO: 610 - protein, 46 aa, ARTIFICIAL SEQUENCE
  Engineered albumin binding polypeptide
LAEAKVLANRELDKYGKSDFYKNVINRAKTVEGVNSLKNHILAACP

SEQ ID NO: 611 - protein, 46 aa, ARTIFICIAL SEQUENCE
  Engineered albumin binding polypeptide
LAEAKVLANRELDKYGCSDFYKNVINRAKTVEGVNSLKNHILAACP

SEQ ID NO: 612 - protein, 46 aa, ARTIFICIAL SEQUENCE
  Engineered albumin binding polypeptide
LAEAKVLANRELDKYGKSDFYKNVINRAKTVEGVNSLKNHILAAKP

SEQ ID NO: 613 - protein, 46 aa, ARTIFICIAL SEQUENCE
  Engineered albumin binding polypeptide
LAEAKVLANRELDKYGCSDFYKSLINRARTVEGVDSLKRHILAAKP

SEQ ID NO: 614 - protein, 46 aa, ARTIFICIAL SEQUENCE
  Engineered albumin binding polypeptide
LAEAKVLANRELDKYGKSDFYKSLINRARTVEGVDSLKRHILAACP

SEQ ID NO: 615 - protein, 46 aa, ARTIFICIAL SEQUENCE
  Engineered albumin binding polypeptide
LAEAKVLANRELDKYGCSDFYKSLINRARTVEGVDSLKRHILAACP

SEQ ID NO: 616 - protein, 46 aa, ARTIFICIAL SEQUENCE
  Engineered albumin binding polypeptide
LAEAKVLANRELDKYGKSDFYKSLINRARTVEGVDSLKRHILAAKP

SEQ ID NO: 617 - protein, 46 aa, ARTIFICIAL SEQUENCE
  Engineered albumin binding polypeptide
LAEAKVLANRELDKYGCSDYYKNLINKAKTVEGVEALKLHILAAKP

SEQ ID NO: 618 - protein, 46 aa, ARTIFICIAL SEQUENCE
  Engineered albumin binding polypeptide
LAEAKVLANRELDKYGKSDYYKNLINKAKTVEGVEALKLHILAACP

SEQ ID NO: 619 - protein, 46 aa, ARTIFICIAL SEQUENCE
  Engineered albumin binding polypeptide
LAEAKVLANRELDKYGCSDYYKNLINKAKTVEGVEALKLHILAACP

SEQ ID NO: 620 - protein, 46 aa, ARTIFICIAL SEQUENCE
  Engineered albumin binding polypeptide
LAEAKVLANRELDKYGKSDYYKNLINKAKTVEGVEALKLHILAAKP

SEQ ID NO: 621 - protein, 46 aa, ARTIFICIAL SEQUENCE
  Engineered albumin binding polypeptide
LAEAKVLANRELDKYGCSDFYKNLINRAKTVEGVDALKAHILAAKP

SEQ ID NO: 622 - protein, 46 aa, ARTIFICIAL SEQUENCE
  Engineered albumin binding polypeptide
LAEAKVLANRELDKYGKSDFYKNLINRAKTVEGVDALKAHILAACP

SEQ ID NO: 623 - protein, 46 aa, ARTIFICIAL SEQUENCE
  Engineered albumin binding polypeptide
LAEAKVLANRELDKYGCSDFYKNLINRAKTVEGVDALKAHILAACP

SEQ ID NO: 624 - protein, 46 aa, ARTIFICIAL SEQUENCE
  Engineered albumin binding polypeptide
LAEAKVLANRELDKYGKSDFYKNLINRAKTVEGVDALKAHILAAKP

SEQ ID NO: 625 - protein, 46 aa, ARTIFICIAL SEQUENCE
  Engineered albumin binding polypeptide
LAEAKVLANRELDKYGCSDYYKNLINKAKTVEGVQALKAHILAAKP

SEQ ID NO: 626 - protein, 46 aa, ARTIFICIAL SEQUENCE
  Engineered albumin binding polypeptide
LAEAKVLANRELDKYGKSDYYKNLINKAKTVEGVQALKAHILAACP

SEQ ID NO: 627 - protein, 46 aa, ARTIFICIAL SEQUENCE
  Engineered albumin binding polypeptide
LAEAKVLANRELDKYGCSDYYKNLINKAKTVEGVQALKAHILAACP

SEQ ID NO: 628 - protein, 46 aa, ARTIFICIAL SEQUENCE
  Engineered albumin binding polypeptide
LAEAKVLANRELDKYGKSDYYKNLINKAKTVEGVQALKAHILAAKP

SEQ ID NO: 629 - protein, 46 aa, ARTIFICIAL SEQUENCE
  Engineered albumin binding polypeptide
LAEAKVLANRELDKYGCSDFYKRLINRAKTVEGVHALKGHILAAKP

SEQ ID NO: 630 - protein, 46 aa, ARTIFICIAL SEQUENCE
  Engineered albumin binding polypeptide
LAEAKVLANRELDKYGKSDFYKRLINRAKTVEGVHALKGHILAACP

SEQ ID NO: 631 - protein, 46 aa, ARTIFICIAL SEQUENCE
  Engineered albumin binding polypeptide
LAEAKVLANRELDKYGCSDFYKRLINRAKTVEGVHALKGHILAACP

SEQ ID NO: 632 - protein, 46 aa, ARTIFICIAL SEQUENCE
  Engineered albumin binding polypeptide
LAEAKVLANRELDKYGKSDFYKRLINRAKTVEGVHALKGHILAAKP

SEQ ID NO: 633 - protein, 46 aa, ARTIFICIAL SEQUENCE
  Engineered albumin binding polypeptide
LAEAKVLANRELDKYGCSDFYKRVINRAKTVEGVHALKDHILAAKP

SEQ ID NO: 634 - protein, 46 aa, ARTIFICIAL SEQUENCE
  Engineered albumin binding polypeptide
LAEAKVLANRELDKYGKSDFYKRVINRAKTVEGVHALKDHILAACP

SEQ ID NO: 635 - protein, 46 aa, ARTIFICIAL SEQUENCE
  Engineered albumin binding polypeptide
LAEAKVLANRELDKYGCSDFYKRVINRAKTVEGVHALKDHILAACP

SEQ ID NO: 636 - protein, 46 aa, ARTIFICIAL SEQUENCE
  Engineered albumin binding polypeptide
LAEAKVLANRELDKYGKSDFYKRVINRAKTVEGVHALKDHILAAKP

SEQ ID NO: 637 - protein, 46 aa, ARTIFICIAL SEQUENCE
  Engineered albumin binding polypeptide
LAEAKVLANRELDKYGCSDFYKRVINRAKTVEGVSALKHEILAAKP

SEQ ID NO: 638 - protein, 46 aa, ARTIFICIAL SEQUENCE
  Engineered albumin binding polypeptide
LAEAKVLANRELDKYGKSDFYKRVINRAKTVEGVSALKHEILAACP

SEQ ID NO: 639 - protein, 46 aa, ARTIFICIAL SEQUENCE
  Engineered albumin binding polypeptide
LAEAKVLANRELDKYGCSDFYKRVINRAKTVEGVSALKHEILAACP

SEQ ID NO: 640 - protein, 46 aa, ARTIFICIAL SEQUENCE
  Engineered albumin binding polypeptide
LAEAKVLANRELDKYGKSDFYKRVINRAKTVEGVSALKHEILAAKP

SEQ ID NO: 641 - protein, 46 aa, ARTIFICIAL SEQUENCE
  Engineered albumin binding polypeptide
LAEAKVLANRELDKYGCSDYYKRLINRAKTVEGVNSLKSHILAAKP

SEQ ID NO: 642 - protein, 46 aa, ARTIFICIAL SEQUENCE
  Engineered albumin binding polypeptide
LAEAKVLANRELDKYGKSDYYKRLINRAKTVEGVNSLKSHILAACP

SEQ ID NO: 643 - protein, 46 aa, ARTIFICIAL SEQUENCE
  Engineered albumin binding polypeptide
LAEAKVLANRELDKYGCSDYYKRLINRAKTVEGVNSLKSHILAACP

SEQ ID NO: 644 - protein, 46 aa, ARTIFICIAL SEQUENCE
  Engineered albumin binding polypeptide
LAEAKVLANRELDKYGKSDYYKRLINRAKTVEGVNSLKSHILAAKP

SEQ ID NO: 645 - protein, 46 aa, ARTIFICIAL SEQUENCE
  Engineered albumin binding polypeptide
LAEAKVLANRELDKYGCSDFYKRVINRAKTVEGVDSLKAEILAAKP

SEQ ID NO: 646 - protein, 46 aa, ARTIFICIAL SEQUENCE
  Engineered albumin binding polypeptide
LAEAKVLANRELDKYGKSDFYKRVINRAKTVEGVDSLKAEILAACP

SEQ ID NO: 647 - protein, 46 aa, ARTIFICIAL SEQUENCE
  Engineered albumin binding polypeptide
LAEAKVLANRELDKYGCSDFYKRVINRAKTVEGVDSLKAEILAACP

SEQ ID NO: 648 - protein, 46 aa, ARTIFICIAL SEQUENCE
  Engineered albumin binding polypeptide
LAEAKVLANRELDKYGKSDFYKRVINRAKTVEGVDSLKAEILAAKP

SEQ ID NO: 649 - protein, 46 aa, ARTIFICIAL SEQUENCE
  Engineered albumin binding polypeptide
LAEAKVLANRELDKYGCSDFYKRLINRARTVEGVQTLKSDILAAKP

SEQ ID NO: 650 - protein, 46 aa, ARTIFICIAL SEQUENCE
  Engineered albumin binding polypeptide
LAEAKVLANRELDKYGKSDFYKRLINRARTVEGVQTLKSDILAACP

SEQ ID NO: 651 - protein, 46 aa, ARTIFICIAL SEQUENCE
  Engineered albumin binding polypeptide
LAEAKVLANRELDKYGCSDFYKRLINRARTVEGVQTLKSDILAACP

SEQ ID NO: 652 - protein, 46 aa, ARTIFICIAL SEQUENCE
  Engineered albumin binding polypeptide
LAEAKVLANRELDKYGKSDFYKRLINRARTVEGVQTLKSDILAAKP

SEQ ID NO: 653 - protein, 46 aa, ARTIFICIAL SEQUENCE
  Engineered albumin binding polypeptide
LAEAKVLANRELDKYGCSDFYKRFINKAKTVEGVETLKSEILAAKP

SEQ ID NO: 654 - protein, 46 aa, ARTIFICIAL SEQUENCE
  Engineered albumin binding polypeptide
LAEAKVLANRELDKYGKSDFYKRFINKAKTVEGVETLKSEILAACP

SEQ ID NO: 655 - protein, 46 aa, ARTIFICIAL SEQUENCE
  Engineered albumin binding polypeptide
LAEAKVLANRELDKYGCSDFYKRFINKAKTVEGVETLKSEILAACP

SEQ ID NO: 656 - protein, 46 aa, ARTIFICIAL SEQUENCE
  Engineered albumin binding polypeptide
LAEAKVLANRELDKYGKSDFYKRFINKAKTVEGVETLKSEILAAKP

SEQ ID NO: 657 - protein, 46 aa, ARTIFICIAL SEQUENCE
  Engineered albumin binding polypeptide
LAEAKVLANRELDKYGCSDFYKRLINRAKTVEGVHSLKDEILAAKP

SEQ ID NO: 658 - protein, 46 aa, ARTIFICIAL SEQUENCE
  Engineered albumin binding polypeptide
LAEAKVLANRELDKYGKSDFYKRLINRAKTVEGVHSLKDEILAACP

SEQ ID NO: 659 - protein, 46 aa, ARTIFICIAL SEQUENCE
  Engineered albumin binding polypeptide
LAEAKVLANRELDKYGCSDFYKRLINRAKTVEGVHSLKDEILAACP

SEQ ID NO: 660 - protein, 46 aa, ARTIFICIAL SEQUENCE
  Engineered albumin binding polypeptide
LAEAKVLANRELDKYGKSDFYKRLINRAKTVEGVHSLKDEILAAKP

SEQ ID NO: 661 - protein, 46 aa, ARTIFICIAL SEQUENCE
  Engineered albumin binding polypeptide
LAEAKVLANRELDKYGCSDYYKRVINKAKTVEGVSSLKAEILAAKP

SEQ ID NO: 662 - protein, 46 aa, ARTIFICIAL SEQUENCE
  Engineered albumin binding polypeptide
LAEAKVLANRELDKYGKSDYYKRVINKAKTVEGVSSLKAEILAACP

SEQ ID NO: 663 - protein, 46 aa, ARTIFICIAL SEQUENCE
  Engineered albumin binding polypeptide
LAEAKVLANRELDKYGCSDYYKRVINKAKTVEGVSSLKAEILAACP

SEQ ID NO: 664 - protein, 46 aa, ARTIFICIAL SEQUENCE
  Engineered albumin binding polypeptide
LAEAKVLANRELDKYGKSDYYKRVINKAKTVEGVSSLKAEILAAKP

SEQ ID NO: 665 - protein, 46 aa, ARTIFICIAL SEQUENCE
  Engineered albumin binding polypeptide
LAEAKVLANRELDKYGCSDFYKRLINRAKTVEGVDALKSHILAAKP

SEQ ID NO: 666 - protein, 46 aa, ARTIFICIAL SEQUENCE
  Engineered albumin binding polypeptide
LAEAKVLANRELDKYGKSDFYKRLINRAKTVEGVDALKSHILAACP

SEQ ID NO: 667 - protein, 46 aa, ARTIFICIAL SEQUENCE
  Engineered albumin binding polypeptide
LAEAKVLANRELDKYGCSDFYKRLINRAKTVEGVDALKSHILAACP

SEQ ID NO: 668 - protein, 46 aa, ARTIFICIAL SEQUENCE
  Engineered albumin binding polypeptide
LAEAKVLANRELDKYGKSDFYKRLINRAKTVEGVDALKSHILAAKP

SEQ ID NO: 669 - protein, 46 aa, ARTIFICIAL SEQUENCE
  Engineered albumin binding polypeptide
LAEAKVLANRELDKYGCSDFYKRLINKAKTVEGVSTLKHDILAAKP

SEQ ID NO: 670 - protein, 46 aa, ARTIFICIAL SEQUENCE
  Engineered albumin binding polypeptide
LAEAKVLANRELDKYGKSDFYKRLINKAKTVEGVSTLKHDILAACP

SEQ ID NO: 671 - protein, 46 aa, ARTIFICIAL SEQUENCE
  Engineered albumin binding polypeptide
LAEAKVLANRELDKYGCSDFYKRLINKAKTVEGVSTLKHDILAACP

SEQ ID NO: 672 - protein, 46 aa, ARTIFICIAL SEQUENCE
  Engineered albumin binding polypeptide
LAEAKVLANRELDKYGKSDFYKRLINKAKTVEGVSTLKHDILAAKP

SEQ ID NO: 673 - protein, 46 aa, ARTIFICIAL SEQUENCE
  Engineered albumin binding polypeptide
LAEAKVLANRELDKYGCSDFYKRLINRAKTVEGVSTLKHDILAAKP

SEQ ID NO: 674 - protein, 46 aa, ARTIFICIAL SEQUENCE
  Engineered albumin binding polypeptide
LAEAKVLANRELDKYGKSDFYKRLINRAKTVEGVSTLKHDILAACP

SEQ ID NO: 675 - protein, 46 aa, ARTIFICIAL SEQUENCE
  Engineered albumin binding polypeptide
LAEAKVLANRELDKYGCSDFYKRLINRAKTVEGVSTLKHDILAACP

SEQ ID NO: 676 - protein, 46 aa, ARTIFICIAL SEQUENCE
  Engineered albumin binding polypeptide
LAEAKVLANRELDKYGKSDFYKRLINRAKTVEGVSTLKHDILAAKP

SEQ ID NO: 677 - protein, 46 aa, ARTIFICIAL SEQUENCE
  Engineered albumin binding polypeptide
LAEAKVLANRELDKYGCSDFYKRLINRAKTVEGVQALKSEILAAKP

SEQ ID NO: 678 - protein, 46 aa, ARTIFICIAL SEQUENCE
  Engineered albumin binding polypeptide
LAEAKVLANRELDKYGKSDFYKRLINRAKTVEGVQALKSEILAACP

SEQ ID NO: 679 - protein, 46 aa, ARTIFICIAL SEQUENCE
  Engineered albumin binding polypeptide
LAEAKVLANRELDKYGCSDFYKRLINRAKTVEGVQALKSEILAACP

SEQ ID NO: 680 - protein, 46 aa, ARTIFICIAL SEQUENCE
  Engineered albumin binding polypeptide
LAEAKVLANRELDKYGKSDFYKRLINRAKTVEGVQALKSEILAAKP

SEQ ID NO: 681 - protein, 46 aa, ARTIFICIAL SEQUENCE
  Engineered albumin binding polypeptide
LAEAKVLANRELDKYGCSDYYKRLINKAKTVEGVDSLKVHILAAKP

SEQ ID NO: 682 - protein, 46 aa, ARTIFICIAL SEQUENCE
  Engineered albumin binding polypeptide
LAEAKVLANRELDKYGKSDYYKRLINKAKTVEGVDSLKVHILAACP

SEQ ID NO: 683 - protein, 46 aa, ARTIFICIAL SEQUENCE
  Engineered albumin binding polypeptide
LAEAKVLANRELDKYGCSDYYKRLINKAKTVEGVDSLKVHILAACP

SEQ ID NO: 684 - protein, 46 aa, ARTIFICIAL SEQUENCE
  Engineered albumin binding polypeptide
LAEAKVLANRELDKYGKSDYYKRLINKAKTVEGVDSLKVHILAAKP

SEQ ID NO: 685 - protein, 46 aa, ARTIFICIAL SEQUENCE
  Engineered albumin binding polypeptide
LAEAKVLANRELDKYGCSDFYKRLINRAKTVEGVQSLKTEILAAKP

SEQ ID NO: 686 - protein, 46 aa, ARTIFICIAL SEQUENCE
  Engineered albumin binding polypeptide
LAEAKVLANRELDKYGKSDFYKRLINRAKTVEGVQSLKTEILAACP

SEQ ID NO: 687 - protein, 46 aa, ARTIFICIAL SEQUENCE
  Engineered albumin binding polypeptide
LAEAKVLANRELDKYGCSDFYKRLINRAKTVEGVQSLKTEILAACP

SEQ ID NO: 688 - protein, 46 aa, ARTIFICIAL SEQUENCE
  Engineered albumin binding polypeptide
LAEAKVLANRELDKYGKSDFYKRLINRAKTVEGVQSLKTEILAAKP

SEQ ID NO: 689 - protein, 46 aa, ARTIFICIAL SEQUENCE
  Engineered albumin binding polypeptide
LAEAKVLANRELDKYGCSDYYKRLINRAKTVEGVDALKTHILAAKP

SEQ ID NO: 690 - protein, 46 aa, ARTIFICIAL SEQUENCE
  Engineered albumin binding polypeptide
LAEAKVLANRELDKYGKSDYYKRLINRAKTVEGVDALKTHILAACP

SEQ ID NO: 691 - protein, 46 aa, ARTIFICIAL SEQUENCE
  Engineered albumin binding polypeptide
LAEAKVLANRELDKYGCSDYYKRLINRAKTVEGVDALKTHILAACP

SEQ ID NO: 692 - protein, 46 aa, ARTIFICIAL SEQUENCE
  Engineered albumin binding polypeptide
LAEAKVLANRELDKYGKSDYYKRLINRAKTVEGVDALKTHILAAKP

SEQ ID NO: 693 - protein, 46 aa, ARTIFICIAL SEQUENCE
  Engineered albumin binding polypeptide
LAEAKVLANRELDKYGCSDFYKRMINRAKTVEGVDSLKTHILAAKP

SEQ ID NO: 694 - protein, 46 aa, ARTIFICIAL SEQUENCE
  Engineered albumin binding polypeptide
LAEAKVLANRELDKYGKSDFYKRMINRAKTVEGVDSLKTHILAACP

SEQ ID NO: 695 - protein, 46 aa, ARTIFICIAL SEQUENCE
  Engineered albumin binding polypeptide
LAEAKVLANRELDKYGCSDFYKRMINRAKTVEGVDSLKTHILAACP

SEQ ID NO: 696 - protein, 46 aa, ARTIFICIAL SEQUENCE
  Engineered albumin binding polypeptide
LAEAKVLANRELDKYGKSDFYKRMINRAKTVEGVDSLKTHILAAKP

SEQ ID NO: 697 - protein, 46 aa, ARTIFICIAL SEQUENCE
  Engineered albumin binding polypeptide
LAEAKVLANRELDKYGCSDFYKRLINRAKTVEGVTTLKTDILAAKP

SEQ ID NO: 698 - protein, 46 aa, ARTIFICIAL SEQUENCE
  Engineered albumin binding polypeptide
LAEAKVLANRELDKYGKSDFYKRLINRAKTVEGVTTLKTDILAACP

SEQ ID NO: 699 - protein, 46 aa, ARTIFICIAL SEQUENCE
  Engineered albumin binding polypeptide
LAEAKVLANRELDKYGCSDFYKRLINRAKTVEGVTTLKTDILAACP

SEQ ID NO: 700 - protein, 46 aa, ARTIFICIAL SEQUENCE
  Engineered albumin binding polypeptide
LAEAKVLANRELDKYGKSDFYKRLINRAKTVEGVTTLKTDILAAKP

SEQ ID NO: 701 - protein, 46 aa, ARTIFICIAL SEQUENCE
  Engineered albumin binding polypeptide
LAEAKVLANRELDKYGCSDFYKRLINRAKTVEGVESLKDHILAAKP

SEQ ID NO: 702 - protein, 46 aa, ARTIFICIAL SEQUENCE
  Engineered albumin binding polypeptide
LAEAKVLANRELDKYGKSDFYKRLINRAKTVEGVESLKDHILAACP

SEQ ID NO: 703 - protein, 46 aa, ARTIFICIAL SEQUENCE
  Engineered albumin binding polypeptide
LAEAKVLANRELDKYGCSDFYKRLINRAKTVEGVESLKDHILAACP

SEQ ID NO: 704 - protein, 46 aa, ARTIFICIAL SEQUENCE
  Engineered albumin binding polypeptide
LAEAKVLANRELDKYGKSDFYKRLINRAKTVEGVESLKDHILAAKP

SEQ ID NO: 705 - protein, 46 aa, ARTIFICIAL SEQUENCE
  Engineered albumin binding polypeptide
LAEAKVLANRELDKYGCSDFYKRYINRAKTVEGVHTLKGHILAAKP

SEQ ID NO: 706 - protein, 46 aa, ARTIFICIAL SEQUENCE
  Engineered albumin binding polypeptide
LAEAKVLANRELDKYGKSDFYKRYINRAKTVEGVHTLKGHILAACP

SEQ ID NO: 707 - protein, 46 aa, ARTIFICIAL SEQUENCE
  Engineered albumin binding polypeptide
LAEAKVLANRELDKYGCSDFYKRYINRAKTVEGVHTLKGHILAACP

SEQ ID NO: 708 - protein, 46 aa, ARTIFICIAL SEQUENCE
  Engineered albumin binding polypeptide
LAEAKVLANRELDKYGKSDFYKRYINRAKTVEGVHTLKGHILAAKP

SEQ ID NO: 709 - protein, 46 aa, ARTIFICIAL SEQUENCE
  Engineered albumin binding polypeptide
LAEAKVLANRELDKYGCSDFYKRLINRAKTVEGVQTLKSDILAAKP

SEQ ID NO: 710 - protein, 46 aa, ARTIFICIAL SEQUENCE
  Engineered albumin binding polypeptide
LAEAKVLANRELDKYGKSDFYKRLINRAKTVEGVQTLKSDILAACP

SEQ ID NO: 711 - protein, 46 aa, ARTIFICIAL SEQUENCE
  Engineered albumin binding polypeptide
LAEAKVLANRELDKYGCSDFYKRLINRAKTVEGVQTLKSDILAACP

SEQ ID NO: 712 - protein, 46 aa, ARTIFICIAL SEQUENCE
  Engineered albumin binding polypeptide
LAEAKVLANRELDKYGKSDFYKRLINRAKTVEGVQTLKSDILAAKP

SEQ ID NO: 713 - protein, 46 aa, ARTIFICIAL SEQUENCE
  Engineered albumin binding polypeptide
LAEAKVLANRELDKYGCSDFYKRLINRAKTVEGVNSLKSHILAAKP

SEQ ID NO: 714 - protein, 46 aa, ARTIFICIAL SEQUENCE
  Engineered albumin binding polypeptide
LAEAKVLANRELDKYGKSDFYKRLINRAKTVEGVNSLKSHILAACP

SEQ ID NO: 715 - protein, 46 aa, ARTIFICIAL SEQUENCE
  Engineered albumin binding polypeptide
LAEAKVLANRELDKYGCSDFYKRLINRAKTVEGVNSLKSHILAACP

SEQ ID NO: 716 - protein, 46 aa, ARTIFICIAL SEQUENCE
  Engineered albumin binding polypeptide
LAEAKVLANRELDKYGKSDFYKRLINRAKTVEGVNSLKSHILAAKP

SEQ ID NO: 717 - protein, 46 aa, ARTIFICIAL SEQUENCE
  Engineered albumin binding polypeptide
LAEAKVLANRELDKYGCSDFYKRLINRAKTVEGVNTLKHDILAAKP

SEQ ID NO: 718 - protein, 46 aa, ARTIFICIAL SEQUENCE
  Engineered albumin binding polypeptide
LAEAKVLANRELDKYGKSDFYKRLINRAKTVEGVNTLKHDILAACP

SEQ ID NO: 719 - protein, 46 aa, ARTIFICIAL SEQUENCE
  Engineered albumin binding polypeptide
LAEAKVLANRELDKYGCSDFYKRLINRAKTVEGVNTLKHDILAACP

SEQ ID NO: 720 - protein, 46 aa, ARTIFICIAL SEQUENCE
  Engineered albumin binding polypeptide
LAEAKVLANRELDKYGKSDFYKRLINRAKTVEGVNTLKHDILAAKP

SEQ ID NO: 721 - protein, 46 aa, ARTIFICIAL SEQUENCE
  Engineered albumin binding polypeptide
LAEAKVLANRELDKYGCSDFYKRLINRAKTVEGVESLKGEILAAKP

SEQ ID NO: 722 - protein, 46 aa, ARTIFICIAL SEQUENCE
  Engineered albumin binding polypeptide
LAEAKVLANRELDKYGKSDFYKRLINRAKTVEGVESLKGEILAACP

SEQ ID NO: 723 - protein, 46 aa, ARTIFICIAL SEQUENCE
  Engineered albumin binding polypeptide
LAEAKVLANRELDKYGCSDFYKRLINRAKTVEGVESLKGEILAACP

SEQ ID NO: 724 - protein, 46 aa, ARTIFICIAL SEQUENCE
  Engineered albumin binding polypeptide
LAEAKVLANRELDKYGKSDFYKRLINRAKTVEGVESLKGEILAAKP

SEQ ID NO: 725 - protein, 46 aa, ARTIFICIAL SEQUENCE
  Engineered albumin binding polypeptide
LAEAKVLANRELDKYGCSDFYKRLINKAKTVEGVHTLKHDILAAKP

SEQ ID NO: 726 - protein, 46 aa, ARTIFICIAL SEQUENCE
  Engineered albumin binding polypeptide
LAEAKVLANRELDKYGKSDFYKRLINKAKTVEGVHTLKHDILAACP

SEQ ID NO: 727 - protein, 46 aa, ARTIFICIAL SEQUENCE
  Engineered albumin binding polypeptide
LAEAKVLANRELDKYGCSDFYKRLINKAKTVEGVHTLKHDILAACP

SEQ ID NO: 728 - protein, 46 aa, ARTIFICIAL SEQUENCE
  Engineered albumin binding polypeptide
LAEAKVLANRELDKYGKSDFYKRLINKAKTVEGVHTLKHDILAAKP

SEQ ID NO: 729 - protein, 46 aa, ARTIFICIAL SEQUENCE
  Engineered albumin binding polypeptide
LAEAKVLANRELDKYGCSDFYKRLINKAKTVEGVDALKVHILAAKP

SEQ ID NO: 730 - protein, 46 aa, ARTIFICIAL SEQUENCE
  Engineered albumin binding polypeptide
LAEAKVLANRELDKYGKSDFYKRLINKAKTVEGVDALKVHILAACP

SEQ ID NO: 731 - protein, 46 aa, ARTIFICIAL SEQUENCE
  Engineered albumin binding polypeptide
LAEAKVLANRELDKYGCSDFYKRLINKAKTVEGVDALKVHILAACP

SEQ ID NO: 732 - protein, 46 aa, ARTIFICIAL SEQUENCE
  Engineered albumin binding polypeptide
LAEAKVLANRELDKYGKSDFYKRLINKAKTVEGVDALKVHILAAKP

SEQ ID NO: 733 - protein, 46 aa, ARTIFICIAL SEQUENCE
  Engineered albumin binding polypeptide
LAEAKVLANRELDKYGCSDYYKRLINRARTVEGVDTLKHDILAAKP

SEQ ID NO: 734 - protein, 46 aa, ARTIFICIAL SEQUENCE
  Engineered albumin binding polypeptide
LAEAKVLANRELDKYGKSDYYKRLINRARTVEGVDTLKHDILAACP

SEQ ID NO: 735 - protein, 46 aa, ARTIFICIAL SEQUENCE
  Engineered albumin binding polypeptide
LAEAKVLANRELDKYGCSDYYKRLINRARTVEGVDTLKHDILAACP

SEQ ID NO: 736 - protein, 46 aa, ARTIFICIAL SEQUENCE
  Engineered albumin binding polypeptide
LAEAKVLANRELDKYGKSDYYKRLINRARTVEGVDTLKHDILAAKP

SEQ ID NO: 737 - protein, 46 aa, ARTIFICIAL SEQUENCE
  Engineered albumin binding polypeptide
LAEAKVLANRELDKYGCSDFYKRVINRARTVEGVQALKADILAAKP

SEQ ID NO: 738 - protein, 46 aa, ARTIFICIAL SEQUENCE
  Engineered albumin binding polypeptide
LAEAKVLANRELDKYGKSDFYKRVINRARTVEGVQALKADILAACP

SEQ ID NO: 739 - protein, 46 aa, ARTIFICIAL SEQUENCE
  Engineered albumin binding polypeptide
LAEAKVLANRELDKYGCSDFYKRVINRARTVEGVQALKADILAACP

SEQ ID NO: 740 - protein, 46 aa, ARTIFICIAL SEQUENCE
  Engineered albumin binding polypeptide
LAEAKVLANRELDKYGKSDFYKRVINRARTVEGVQALKADILAAKP

SEQ ID NO: 741 - protein, 46 aa, ARTIFICIAL SEQUENCE
  Engineered albumin binding polypeptide
LAEAKVLANRELDKYGCSDFYKRLINRAKTVEGVESLKADILAAKP

SEQ ID NO: 742 - protein, 46 aa, ARTIFICIAL SEQUENCE
  Engineered albumin binding polypeptide
LAEAKVLANRELDKYGKSDFYKRLINRAKTVEGVESLKADILAACP

SEQ ID NO: 743 - protein, 46 aa, ARTIFICIAL SEQUENCE
  Engineered albumin binding polypeptide
LAEAKVLANRELDKYGCSDFYKRLINRAKTVEGVESLKADILAACP

SEQ ID NO: 744 - protein, 46 aa, ARTIFICIAL SEQUENCE
  Engineered albumin binding polypeptide
LAEAKVLANRELDKYGKSDFYKRLINRAKTVEGVESLKADILAAKP

SEQ ID NO: 745 - protein, 46 aa, ARTIFICIAL SEQUENCE
  Engineered albumin binding polypeptide
LAEAKVLANRELDKYGCSDYYKRLINKAKTVEGVDALKAHILAAKP

SEQ ID NO: 746 - protein, 46 aa, ARTIFICIAL SEQUENCE
  Engineered albumin binding polypeptide
LAEAKVLANRELDKYGKSDYYKRLINKAKTVEGVDALKAHILAACP

SEQ ID NO: 747 - protein, 46 aa, ARTIFICIAL SEQUENCE
  Engineered albumin binding polypeptide
LAEAKVLANRELDKYGCSDYYKRLINKAKTVEGVDALKAHILAACP

SEQ ID NO: 748 - protein, 46 aa, ARTIFICIAL SEQUENCE
  Engineered albumin binding polypeptide
LAEAKVLANRELDKYGKSDYYKRLINKAKTVEGVDALKAHILAAKP

SEQ ID NO: 749 - protein, 46 aa, ARTIFICIAL SEQUENCE
  Engineered albumin binding polypeptide
LAEAKVLANRELDKYGCSDYYKRLINRAKTVEGVESLKTHILAAKP

SEQ ID NO: 750 - protein, 46 aa, ARTIFICIAL SEQUENCE
  Engineered albumin binding polypeptide
LAEAKVLANRELDKYGKSDYYKRLINRAKTVEGVESLKTHILAACP

SEQ ID NO: 751 - protein, 46 aa, ARTIFICIAL SEQUENCE
  Engineered albumin binding polypeptide
LAEAKVLANRELDKYGCSDYYKRLINRAKTVEGVESLKTHILAACP

SEQ ID NO: 752 - protein, 46 aa, ARTIFICIAL SEQUENCE
  Engineered albumin binding polypeptide
LAEAKVLANRELDKYGKSDYYKRLINRAKTVEGVESLKTHILAAKP

SEQ ID NO: 753 - protein, 46 aa, ARTIFICIAL SEQUENCE
  Engineered albumin binding polypeptide
LAEAKVLANRELDKYGCSDFYKRLINRARTVEGVDSLKVEILAAKP

SEQ ID NO: 754 - protein, 46 aa, ARTIFICIAL SEQUENCE
  Engineered albumin binding polypeptide
LAEAKVLANRELDKYGKSDFYKRLINRARTVEGVDSLKVEILAACP

SEQ ID NO: 755 - protein, 46 aa, ARTIFICIAL SEQUENCE
  Engineered albumin binding polypeptide
LAEAKVLANRELDKYGCSDFYKRLINRARTVEGVDSLKVEILAACP

SEQ ID NO: 756 - protein, 46 aa, ARTIFICIAL SEQUENCE
  Engineered albumin binding polypeptide
LAEAKVLANRELDKYGKSDFYKRLINRARTVEGVDSLKVEILAAKP

SEQ ID NO: 757 - protein, 46 aa, ARTIFICIAL SEQUENCE
  Engineered albumin binding polypeptide
LAEAKVLANRELDKYGCSDFYKRVINRAKTVEGVSALKREILAAKP

SEQ ID NO: 758 - protein, 46 aa, ARTIFICIAL SEQUENCE
  Engineered albumin binding polypeptide
LAEAKVLANRELDKYGKSDFYKRVINRAKTVEGVSALKREILAACP

SEQ ID NO: 759 - protein, 46 aa, ARTIFICIAL SEQUENCE
  Engineered albumin binding polypeptide
LAEAKVLANRELDKYGCSDFYKRVINRAKTVEGVSALKREILAACP

SEQ ID NO: 760 - protein, 46 aa, ARTIFICIAL SEQUENCE
  Engineered albumin binding polypeptide
LAEAKVLANRELDKYGKSDFYKRVINRAKTVEGVSALKREILAAKP

SEQ ID NO: 761 - protein, 46 aa, ARTIFICIAL SEQUENCE
  Engineered albumin binding polypeptide
LAEAKVLANRELDKYGCSDFYKRLINRAKTVEGVNALKSDILAAKP

SEQ ID NO: 762 - protein, 46 aa, ARTIFICIAL SEQUENCE
  Engineered albumin binding polypeptide
LAEAKVLANRELDKYGKSDFYKRLINRAKTVEGVNALKSDILAACP

SEQ ID NO: 763 - protein, 46 aa, ARTIFICIAL SEQUENCE
  Engineered albumin binding polypeptide
LAEAKVLANRELDKYGCSDFYKRLINRAKTVEGVNALKSDILAACP

SEQ ID NO: 764 - protein, 46 aa, ARTIFICIAL SEQUENCE
  Engineered albumin binding polypeptide
LAEAKVLANRELDKYGKSDFYKRLINRAKTVEGVNALKSDILAAKP

SEQ ID NO: 765 - protein, 46 aa, ARTIFICIAL SEQUENCE
  Engineered albumin binding polypeptide
LAEAKVLANRELDKYGCSDFYKRLINRAKTVEGVSALKQEILAAKP

SEQ ID NO: 766 - protein, 46 aa, ARTIFICIAL SEQUENCE
  Engineered albumin binding polypeptide
LAEAKVLANRELDKYGKSDFYKRLINRAKTVEGVSALKQEILAACP

SEQ ID NO: 767 - protein, 46 aa, ARTIFICIAL SEQUENCE
  Engineered albumin binding polypeptide
LAEAKVLANRELDKYGCSDFYKRLINRAKTVEGVSALKQEILAACP

SEQ ID NO: 768 - protein, 46 aa, ARTIFICIAL SEQUENCE
  Engineered albumin binding polypeptide
LAEAKVLANRELDKYGKSDFYKRLINRAKTVEGVSALKQEILAAKP

SEQ ID NO: 769 - protein, 46 aa, ARTIFICIAL SEQUENCE
  Engineered albumin binding polypeptide
LAEAKVLANRELDKYGCSDFYKRLINRAKTVEGVQSLKDHILAAKP

SEQ ID NO: 770 - protein, 46 aa, ARTIFICIAL SEQUENCE
  Engineered albumin binding polypeptide
LAEAKVLANRELDKYGKSDFYKRLINRAKTVEGVQSLKDHILAACP

SEQ ID NO: 771 - protein, 46 aa, ARTIFICIAL SEQUENCE
  Engineered albumin binding polypeptide
LAEAKVLANRELDKYGCSDFYKRLINRAKTVEGVQSLKDHILAACP

SEQ ID NO: 772 - protein, 46 aa, ARTIFICIAL SEQUENCE
  Engineered albumin binding polypeptide
LAEAKVLANRELDKYGKSDFYKRLINRAKTVEGVQSLKDHILAAKP

SEQ ID NO: 773 - protein, 46 aa, ARTIFICIAL SEQUENCE
  Engineered albumin binding polypeptide
LAEAKVLANRELDKYGCSDFYKRLINRAKTVEGVDALKCHILAAKP

SEQ ID NO: 774 - protein, 46 aa, ARTIFICIAL SEQUENCE
  Engineered albumin binding polypeptide
LAEAKVLANRELDKYGKSDFYKRLINRAKTVEGVDALKCHILAACP

SEQ ID NO: 775 - protein, 46 aa, ARTIFICIAL SEQUENCE
  Engineered albumin binding polypeptide
LAEAKVLANRELDKYGCSDFYKRLINRAKTVEGVDALKCHILAACP

SEQ ID NO: 776 - protein, 46 aa, ARTIFICIAL SEQUENCE
  Engineered albumin binding polypeptide
LAEAKVLANRELDKYGKSDFYKRLINRAKTVEGVDALKCHILAAKP

SEQ ID NO: 777 - protein, 46 aa, ARTIFICIAL SEQUENCE
  Engineered albumin binding polypeptide
LAEAKVLANRELDKYGCSDFYKRVINKAKTVEGVEALKADILAAKP

SEQ ID NO: 778 - protein, 46 aa, ARTIFICIAL SEQUENCE
  Engineered albumin binding polypeptide
LAEAKVLANRELDKYGKSDFYKRVINKAKTVEGVEALKADILAACP

SEQ ID NO: 779 - protein, 46 aa, ARTIFICIAL SEQUENCE
  Engineered albumin binding polypeptide
LAEAKVLANRELDKYGCSDFYKRVINKAKTVEGVEALKADILAACP

SEQ ID NO: 780 - protein, 46 aa, ARTIFICIAL SEQUENCE
  Engineered albumin binding polypeptide
LAEAKVLANRELDKYGKSDFYKRVINKAKTVEGVEALKADILAAKP

SEQ ID NO: 781 - protein, 46 aa, ARTIFICIAL SEQUENCE
  Engineered albumin binding polypeptide
LAEAKVLANRELDKYGCSDFYKRLINRAKTVEGVETLKRDILAAKP

SEQ ID NO: 782 - protein, 46 aa, ARTIFICIAL SEQUENCE
  Engineered albumin binding polypeptide
LAEAKVLANRELDKYGKSDFYKRLINRAKTVEGVETLKRDILAACP

SEQ ID NO: 783 - protein, 46 aa, ARTIFICIAL SEQUENCE
  Engineered albumin binding polypeptide
LAEAKVLANRELDKYGCSDFYKRLINRAKTVEGVETLKRDILAACP

SEQ ID NO: 784 - protein, 46 aa, ARTIFICIAL SEQUENCE
  Engineered albumin binding polypeptide
LAEAKVLANRELDKYGKSDFYKRLINRAKTVEGVETLKRDILAAKP

SEQ ID NO: 785 - protein, 46 aa, ARTIFICIAL SEQUENCE
  Engineered albumin binding polypeptide
LAEAKVLANRELDKYGCSDFYKRLINRARTVEGVQTLKTDILAAKP

SEQ ID NO: 786 - protein, 46 aa, ARTIFICIAL SEQUENCE
  Engineered albumin binding polypeptide
LAEAKVLANRELDKYGKSDFYKRLINRARTVEGVQTLKTDILAACP

SEQ ID NO: 787 - protein, 46 aa, ARTIFICIAL SEQUENCE
  Engineered albumin binding polypeptide
LAEAKVLANRELDKYGCSDFYKRLINRARTVEGVQTLKTDILAACP

SEQ ID NO: 788 - protein, 46 aa, ARTIFICIAL SEQUENCE
  Engineered albumin binding polypeptide
LAEAKVLANRELDKYGKSDFYKRLINRARTVEGVQTLKTDILAAKP

SEQ ID NO: 789 - protein, 46 aa, ARTIFICIAL SEQUENCE
  Engineered albumin binding polypeptide
LAEAKVLANRELDKYGCSDYYKRLINRAKTVEGVQALKAHILAAKP

SEQ ID NO: 790 - protein, 46 aa, ARTIFICIAL SEQUENCE
  Engineered albumin binding polypeptide
LAEAKVLANRELDKYGKSDYYKRLINRAKTVEGVQALKAHILAACP

SEQ ID NO: 791 - protein, 46 aa, ARTIFICIAL SEQUENCE
  Engineered albumin binding polypeptide
LAEAKVLANRELDKYGCSDYYKRLINRAKTVEGVQALKAHILAACP

SEQ ID NO: 792 - protein, 46 aa, ARTIFICIAL SEQUENCE
  Engineered albumin binding polypeptide
LAEAKVLANRELDKYGKSDYYKRLINRAKTVEGVQALKAHILAAKP

SEQ ID NO: 793 - protein, 46 aa, ARTIFICIAL SEQUENCE
  Engineered albumin binding polypeptide
LAEAKVLANRELDKYGCSDFYKRVINRAKTVEGVNSLKNHILAAKP

SEQ ID NO: 794 - protein, 46 aa, ARTIFICIAL SEQUENCE
  Engineered albumin binding polypeptide
LAEAKVLANRELDKYGKSDFYKRVINRAKTVEGVNSLKNHILAACP

SEQ ID NO: 795 - protein, 46 aa, ARTIFICIAL SEQUENCE
  Engineered albumin binding polypeptide
LAEAKVLANRELDKYGCSDFYKRVINRAKTVEGVNSLKNHILAACP

SEQ ID NO: 796 - protein, 46 aa, ARTIFICIAL SEQUENCE
  Engineered albumin binding polypeptide
LAEAKVLANRELDKYGKSDFYKRVINRAKTVEGVNSLKNHILAAKP

SEQ ID NO: 797 - protein, 46 aa, ARTIFICIAL SEQUENCE
  Engineered albumin binding polypeptide
LAEAKVLANRELDKYGCSDFYKRLINRARTVEGVDSLKRHILAAKP

SEQ ID NO: 798 - protein, 46 aa, ARTIFICIAL SEQUENCE
  Engineered albumin binding polypeptide
LAEAKVLANRELDKYGKSDFYKRLINRARTVEGVDSLKRHILAACP

SEQ ID NO: 799 - protein, 46 aa, ARTIFICIAL SEQUENCE
  Engineered albumin binding polypeptide
LAEAKVLANRELDKYGCSDFYKRLINRARTVEGVDSLKRHILAACP

SEQ ID NO: 800 - protein, 46 aa, ARTIFICIAL SEQUENCE
  Engineered albumin binding polypeptide
LAEAKVLANRELDKYGKSDFYKRLINRARTVEGVDSLKRHILAAKP

SEQ ID NO: 801 - protein, 46 aa, ARTIFICIAL SEQUENCE
  Engineered albumin binding polypeptide
LAEAKVLANRELDKYGCSDYYKRLINKAKTVEGVEALKLHILAAKP

SEQ ID NO: 802 - protein, 46 aa, ARTIFICIAL SEQUENCE
  Engineered albumin binding polypeptide
LAEAKVLANRELDKYGKSDYYKRLINKAKTVEGVEALKLHILAACP

SEQ ID NO: 803 - protein, 46 aa, ARTIFICIAL SEQUENCE
  Engineered albumin binding polypeptide
LAEAKVLANRELDKYGCSDYYKRLINKAKTVEGVEALKLHILAACP

SEQ ID NO: 804 - protein, 46 aa, ARTIFICIAL SEQUENCE
  Engineered albumin binding polypeptide
LAEAKVLANRELDKYGKSDYYKRLINKAKTVEGVEALKLHILAAKP

SEQ ID NO: 805 - protein, 46 aa, ARTIFICIAL SEQUENCE
  Engineered albumin binding polypeptide
LAEAKVLANRELDKYGCSDFYKRLINRAKTVEGVDALKAHILAAKP

SEQ ID NO: 806 - protein, 46 aa, ARTIFICIAL SEQUENCE
  Engineered albumin binding polypeptide
LAEAKVLANRELDKYGKSDFYKRLINRAKTVEGVDALKAHILAACP

SEQ ID NO: 807 - protein, 46 aa, ARTIFICIAL SEQUENCE
  Engineered albumin binding polypeptide
LAEAKVLANRELDKYGCSDFYKRLINRAKTVEGVDALKAHILAACP

SEQ ID NO: 808 - protein, 46 aa, ARTIFICIAL SEQUENCE
  Engineered albumin binding polypeptide
LAEAKVLANRELDKYGKSDFYKRLINRAKTVEGVDALKAHILAAKP

SEQ ID NO: 809 - protein, 46 aa, ARTIFICIAL SEQUENCE
  Engineered albumin binding polypeptide
LAEAKVLANRELDKYGCSDYYKRLINKAKTVEGVQALKAHILAAKP

SEQ ID NO: 810 - protein, 46 aa, ARTIFICIAL SEQUENCE
  Engineered albumin binding polypeptide
LAEAKVLANRELDKYGKSDYYKRLINKAKTVEGVQALKAHILAACP

SEQ ID NO: 811 - protein, 46 aa, ARTIFICIAL SEQUENCE
  Engineered albumin binding polypeptide
LAEAKVLANRELDKYGCSDYYKRLINKAKTVEGVQALKAHILAACP

SEQ ID NO: 812 - protein, 46 aa, ARTIFICIAL SEQUENCE
  Engineered albumin binding polypeptide
LAEAKVLANRELDKYGKSDYYKRLINKAKTVEGVQALKAHILAAKP

SEQ ID NO: 813 - protein, 46 aa, ARTIFICIAL SEQUENCE
  Engineered albumin binding polypeptide
LAEAKVLANRELDKYGCSDFYKRVINRAKTVEGVSALKHHILAAKP

SEQ ID NO: 814 - protein, 46 aa, ARTIFICIAL SEQUENCE
  Engineered albumin binding polypeptide
LAEAKVLANRELDKYGKSDFYKRVINRAKTVEGVSALKHHILAACP

SEQ ID NO: 815 - protein, 46 aa, ARTIFICIAL SEQUENCE
  Engineered albumin binding polypeptide
LAEAKVLANRELDKYGCSDFYKRVINRAKTVEGVSALKHHILAACP

SEQ ID NO: 816 - protein, 46 aa, ARTIFICIAL SEQUENCE
  Engineered albumin binding polypeptide
LAEAKVLANRELDKYGKSDFYKRVINRAKTVEGVSALKHHILAAKP

SEQ ID NO: 817 - protein, 46 aa, ARTIFICIAL SEQUENCE
  Engineered albumin binding polypeptide
LAEAKVLANRELDKYGCSDFYKRLINRAKTVEGVNTLKAHILAAKP

SEQ ID NO: 818 - protein, 46 aa, ARTIFICIAL SEQUENCE
  Engineered albumin binding polypeptide
LAEAKVLANRELDKYGKSDFYKRLINRAKTVEGVNTLKAHILAACP

SEQ ID NO: 819 - protein, 46 aa, ARTIFICIAL SEQUENCE
  Engineered albumin binding polypeptide
LAEAKVLANRELDKYGCSDFYKRLINRAKTVEGVNTLKAHILAACP

SEQ ID NO: 820 - protein, 46 aa, ARTIFICIAL SEQUENCE
  Engineered albumin binding polypeptide
LAEAKVLANRELDKYGKSDFYKRLINRAKTVEGVNTLKAHILAAKP

SEQ ID NO: 821 - protein, 46 aa, ARTIFICIAL SEQUENCE
  Engineered albumin binding polypeptide
LAEAKVLANRELDKYGCSDFYKRLINRAKTVGGVQSLKSHILAAKP

SEQ ID NO: 822 - protein, 46 aa, ARTIFICIAL SEQUENCE
  Engineered albumin binding polypeptide
LAEAKVLANRELDKYGKSDFYKRLINRAKTVGGVQSLKSHILAACP

SEQ ID NO: 823 - protein, 46 aa, ARTIFICIAL SEQUENCE
  Engineered albumin binding polypeptide
LAEAKVLANRELDKYGCSDFYKRLINRAKTVGGVQSLKSHILAACP

SEQ ID NO: 824 - protein, 46 aa, ARTIFICIAL SEQUENCE
  Engineered albumin binding polypeptide
LAEAKVLANRELDKYGKSDFYKRLINRAKTVGGVQSLKSHILAAKP

SEQ ID NO: 825 - protein, 46 aa, ARTIFICIAL SEQUENCE
  Engineered albumin binding polypeptide
LAEAKVLANRELDKYGCSDFYKRVINRAKTVEGVDSLKAHILAAKP

SEQ ID NO: 826 - protein, 46 aa, ARTIFICIAL SEQUENCE
  Engineered albumin binding polypeptide
LAEAKVLANRELDKYGKSDFYKRVINRAKTVEGVDSLKAHILAACP

SEQ ID NO: 827 - protein, 46 aa, ARTIFICIAL SEQUENCE
  Engineered albumin binding polypeptide
LAEAKVLANRELDKYGCSDFYKRVINRAKTVEGVDSLKAHILAACP

SEQ ID NO: 828 - protein, 46 aa, ARTIFICIAL SEQUENCE
  Engineered albumin binding polypeptide
LAEAKVLANRELDKYGKSDFYKRVINRAKTVEGVDSLKAHILAAKP

SEQ ID NO: 829 - protein, 46 aa, ARTIFICIAL SEQUENCE
  Engineered albumin binding polypeptide
LAEAKVLANRELDKYGCSDFYKRLINRARTVEGVQTLKSHILAAKP

SEQ ID NO: 830 - protein, 46 aa, ARTIFICIAL SEQUENCE
  Engineered albumin binding polypeptide
LAEAKVLANRELDKYGKSDFYKRLINRARTVEGVQTLKSHILAACP

SEQ ID NO: 831 - protein, 46 aa, ARTIFICIAL SEQUENCE
  Engineered albumin binding polypeptide
LAEAKVLANRELDKYGCSDFYKRLINRARTVEGVQTLKSHILAACP

SEQ ID NO: 832 - protein, 46 aa, ARTIFICIAL SEQUENCE
  Engineered albumin binding polypeptide
LAEAKVLANRELDKYGKSDFYKRLINRARTVEGVQTLKSHILAAKP

SEQ ID NO: 833 - protein, 46 aa, ARTIFICIAL SEQUENCE
  Engineered albumin binding polypeptide
LAEAKVLANRELDKYGCSDFYKRFINKAKTVEGVETLKSHILAAKP

SEQ ID NO: 834 - protein, 46 aa, ARTIFICIAL SEQUENCE
  Engineered albumin binding polypeptide
LAEAKVLANRELDKYGKSDFYKRFINKAKTVEGVETLKSHILAACP

SEQ ID NO: 835 - protein, 46 aa, ARTIFICIAL SEQUENCE
  Engineered albumin binding polypeptide
LAEAKVLANRELDKYGCSDFYKRFINKAKTVEGVETLKSHILAACP

SEQ ID NO: 836 - protein, 46 aa, ARTIFICIAL SEQUENCE
  Engineered albumin binding polypeptide
LAEAKVLANRELDKYGKSDFYKRFINKAKTVEGVETLKSHILAAKP

SEQ ID NO: 837 - protein, 46 aa, ARTIFICIAL SEQUENCE
  Engineered albumin binding polypeptide
LAEAKVLANRELDKYGCSDFYKRLINRAKTVEGVHSLKDHILAAKP

SEQ ID NO: 838 - protein, 46 aa, ARTIFICIAL SEQUENCE
  Engineered albumin binding polypeptide
LAEAKVLANRELDKYGKSDFYKRLINRAKTVEGVHSLKDHILAACP

SEQ ID NO: 839 - protein, 46 aa, ARTIFICIAL SEQUENCE
  Engineered albumin binding polypeptide
LAEAKVLANRELDKYGCSDFYKRLINRAKTVEGVHSLKDHILAACP

SEQ ID NO: 840 - protein, 46 aa, ARTIFICIAL SEQUENCE
  Engineered albumin binding polypeptide
LAEAKVLANRELDKYGKSDFYKRLINRAKTVEGVHSLKDHILAAKP

SEQ ID NO: 841 - protein, 46 aa, ARTIFICIAL SEQUENCE
  Engineered albumin binding polypeptide
LAEAKVLANRELDKYGCSDYYKRVINKAKTVEGVSSLKAHILAAKP

SEQ ID NO: 842 - protein, 46 aa, ARTIFICIAL SEQUENCE
  Engineered albumin binding polypeptide
LAEAKVLANRELDKYGKSDYYKRVINKAKTVEGVSSLKAHILAACP

SEQ ID NO: 843 - protein, 46 aa, ARTIFICIAL SEQUENCE
  Engineered albumin binding polypeptide
LAEAKVLANRELDKYGCSDYYKRVINKAKTVEGVSSLKAHILAACP

SEQ ID NO: 844 - protein, 46 aa, ARTIFICIAL SEQUENCE
  Engineered albumin binding polypeptide
LAEAKVLANRELDKYGKSDYYKRVINKAKTVEGVSSLKAHILAAKP

SEQ ID NO: 845 - protein, 46 aa, ARTIFICIAL SEQUENCE
  Engineered albumin binding polypeptide
LAEAKVLANRELDKYGCSDFYKRLINKAKTVEGVSTLKHHILAAKP

SEQ ID NO: 846 - protein, 46 aa, ARTIFICIAL SEQUENCE
  Engineered albumin binding polypeptide
LAEAKVLANRELDKYGKSDFYKRLINKAKTVEGVSTLKHHILAACP

SEQ ID NO: 847 - protein, 46 aa, ARTIFICIAL SEQUENCE
  Engineered albumin binding polypeptide
LAEAKVLANRELDKYGCSDFYKRLINKAKTVEGVSTLKHHILAACP

SEQ ID NO: 848 - protein, 46 aa, ARTIFICIAL SEQUENCE
  Engineered albumin binding polypeptide
LAEAKVLANRELDKYGKSDFYKRLINKAKTVEGVSTLKHHILAAKP

SEQ ID NO: 849 - protein, 46 aa, ARTIFICIAL SEQUENCE
  Engineered albumin binding polypeptide
LAEAKVLANRELDKYGCSDFYKRLINRAKTVEGVSTLKHHILAAKP

SEQ ID NO: 850 - protein, 46 aa, ARTIFICIAL SEQUENCE
  Engineered albumin binding polypeptide
LAEAKVLANRELDKYGKSDFYKRLINRAKTVEGVSTLKHHILAACP

SEQ ID NO: 851 - protein, 46 aa, ARTIFICIAL SEQUENCE
  Engineered albumin binding polypeptide
LAEAKVLANRELDKYGCSDFYKRLINRAKTVEGVSTLKHHILAACP

SEQ ID NO: 852 - protein, 46 aa, ARTIFICIAL SEQUENCE
  Engineered albumin binding polypeptide
LAEAKVLANRELDKYGKSDFYKRLINRAKTVEGVSTLKHHILAAKP

SEQ ID NO: 853 - protein, 46 aa, ARTIFICIAL SEQUENCE
  Engineered albumin binding polypeptide
LAEAKVLANRELDKYGCSDFYKRLINRAKTVEGVQALKSHILAAKP

SEQ ID NO: 854 - protein, 46 aa, ARTIFICIAL SEQUENCE
  Engineered albumin binding polypeptide
LAEAKVLANRELDKYGKSDFYKRLINRAKTVEGVQALKSHILAACP

SEQ ID NO: 855 - protein, 46 aa, ARTIFICIAL SEQUENCE
  Engineered albumin binding polypeptide
LAEAKVLANRELDKYGCSDFYKRLINRAKTVEGVQALKSHILAACP

SEQ ID NO: 856 - protein, 46 aa, ARTIFICIAL SEQUENCE
  Engineered albumin binding polypeptide
LAEAKVLANRELDKYGKSDFYKRLINRAKTVEGVQALKSHILAAKP

SEQ ID NO: 857 - protein, 46 aa, ARTIFICIAL SEQUENCE
  Engineered albumin binding polypeptide
LAEAKVLANRELDKYGCSDFYKRLINRAKTVEGVQSLKTHILAAKP

SEQ ID NO: 858 - protein, 46 aa, ARTIFICIAL SEQUENCE
  Engineered albumin binding polypeptide
LAEAKVLANRELDKYGKSDFYKRLINRAKTVEGVQSLKTHILAACP

SEQ ID NO: 859 - protein, 46 aa, ARTIFICIAL SEQUENCE
  Engineered albumin binding polypeptide
LAEAKVLANRELDKYGCSDFYKRLINRAKTVEGVQSLKTHILAACP

SEQ ID NO: 860 - protein, 46 aa, ARTIFICIAL SEQUENCE
  Engineered albumin binding polypeptide
LAEAKVLANRELDKYGKSDFYKRLINRAKTVEGVQSLKTHILAAKP

SEQ ID NO: 861 - protein, 46 aa, ARTIFICIAL SEQUENCE
  Engineered albumin binding polypeptide
LAEAKVLANRELDKYGCSDFYKRLINRAKTVEGVTTLKTHILAAKP

SEQ ID NO: 862 - protein, 46 aa, ARTIFICIAL SEQUENCE
  Engineered albumin binding polypeptide
LAEAKVLANRELDKYGKSDFYKRLINRAKTVEGVTTLKTHILAACP

SEQ ID NO: 863 - protein, 46 aa, ARTIFICIAL SEQUENCE
  Engineered albumin binding polypeptide
LAEAKVLANRELDKYGCSDFYKRLINRAKTVEGVTTLKTHILAACP

SEQ ID NO: 864 - protein, 46 aa, ARTIFICIAL SEQUENCE
  Engineered albumin binding polypeptide
LAEAKVLANRELDKYGKSDFYKRLINRAKTVEGVTTLKTHILAAKP

SEQ ID NO: 865 - protein, 46 aa, ARTIFICIAL SEQUENCE
  Engineered albumin binding polypeptide
LAEAKVLANRELDKYGCSDFYKRLINRAKTVEGVQTLKSHILAAKP

SEQ ID NO: 866 - protein, 46 aa, ARTIFICIAL SEQUENCE
  Engineered albumin binding polypeptide
LAEAKVLANRELDKYGKSDFYKRLINRAKTVEGVQTLKSHILAACP

SEQ ID NO: 867 - protein, 46 aa, ARTIFICIAL SEQUENCE
  Engineered albumin binding polypeptide
LAEAKVLANRELDKYGCSDFYKRLINRAKTVEGVQTLKSHILAACP

SEQ ID NO: 868 - protein, 46 aa, ARTIFICIAL SEQUENCE
  Engineered albumin binding polypeptide
LAEAKVLANRELDKYGKSDFYKRLINRAKTVEGVQTLKSHILAAKP

SEQ ID NO: 869 - protein, 46 aa, ARTIFICIAL SEQUENCE
  Engineered albumin binding polypeptide
LAEAKVLANRELDKYGCSDFYKRLINRAKTVEGVNTLKHHILAAKP

SEQ ID NO: 870 - protein, 46 aa, ARTIFICIAL SEQUENCE
  Engineered albumin binding polypeptide
LAEAKVLANRELDKYGKSDFYKRLINRAKTVEGVNTLKHHILAACP

SEQ ID NO: 871 - protein, 46 aa, ARTIFICIAL SEQUENCE
  Engineered albumin binding polypeptide
LAEAKVLANRELDKYGCSDFYKRLINRAKTVEGVNTLKHHILAACP

SEQ ID NO: 872 - protein, 46 aa, ARTIFICIAL SEQUENCE
  Engineered albumin binding polypeptide
LAEAKVLANRELDKYGKSDFYKRLINRAKTVEGVNTLKHHILAAKP

SEQ ID NO: 873 - protein, 46 aa, ARTIFICIAL SEQUENCE
  Engineered albumin binding polypeptide
LAEAKVLANRELDKYGCSDFYKRLINRAKTVEGVESLKGHILAAKP

SEQ ID NO: 874 - protein, 46 aa, ARTIFICIAL SEQUENCE
  Engineered albumin binding polypeptide
LAEAKVLANRELDKYGKSDFYKRLINRAKTVEGVESLKGHILAACP

SEQ ID NO: 875 - protein, 46 aa, ARTIFICIAL SEQUENCE
  Engineered albumin binding polypeptide
LAEAKVLANRELDKYGCSDFYKRLINRAKTVEGVESLKGHILAACP

SEQ ID NO: 876 - protein, 46 aa, ARTIFICIAL SEQUENCE
  Engineered albumin binding polypeptide
LAEAKVLANRELDKYGKSDFYKRLINRAKTVEGVESLKGHILAAKP

SEQ ID NO: 877 - protein, 46 aa, ARTIFICIAL SEQUENCE
  Engineered albumin binding polypeptide
LAEAKVLANRELDKYGCSDFYKRLINKAKTVEGVHTLKHHILAAKP

SEQ ID NO: 878 - protein, 46 aa, ARTIFICIAL SEQUENCE
  Engineered albumin binding polypeptide
LAEAKVLANRELDKYGKSDFYKRLINKAKTVEGVHTLKHHILAACP

SEQ ID NO: 879 - protein, 46 aa, ARTIFICIAL SEQUENCE
  Engineered albumin binding polypeptide
LAEAKVLANRELDKYGCSDFYKRLINKAKTVEGVHTLKHHILAACP

SEQ ID NO: 880 - protein, 46 aa, ARTIFICIAL SEQUENCE
  Engineered albumin binding polypeptide
LAEAKVLANRELDKYGKSDFYKRLINKAKTVEGVHTLKHHILAAKP

SEQ ID NO: 881 - protein, 46 aa, ARTIFICIAL SEQUENCE
  Engineered albumin binding polypeptide
LAEAKVLANRELDKYGCSDYYKRLINRAKTVEGVHALKAHILAAKP

SEQ ID NO: 882 - protein, 46 aa, ARTIFICIAL SEQUENCE
  Engineered albumin binding polypeptide
LAEAKVLANRELDKYGKSDYYKRLINRAKTVEGVHALKAHILAACP

SEQ ID NO: 883 - protein, 46 aa, ARTIFICIAL SEQUENCE
  Engineered albumin binding polypeptide
LAEAKVLANRELDKYGCSDYYKRLINRAKTVEGVHALKAHILAACP

SEQ ID NO: 884 - protein, 46 aa, ARTIFICIAL SEQUENCE
  Engineered albumin binding polypeptide
LAEAKVLANRELDKYGKSDYYKRLINRAKTVEGVHALKAHILAAKP

SEQ ID NO: 885 - protein, 46 aa, ARTIFICIAL SEQUENCE
  Engineered albumin binding polypeptide
LAEAKVLANRELDKYGCSDYYKRLINRARTVEGVDTLKHHILAAKP

SEQ ID NO: 886 - protein, 46 aa, ARTIFICIAL SEQUENCE
  Engineered albumin binding polypeptide
LAEAKVLANRELDKYGKSDYYKRLINRARTVEGVDTLKHHILAACP

SEQ ID NO: 887 - protein, 46 aa, ARTIFICIAL SEQUENCE
  Engineered albumin binding polypeptide
LAEAKVLANRELDKYGCSDYYKRLINRARTVEGVDTLKHHILAACP

SEQ ID NO: 888 - protein, 46 aa, ARTIFICIAL SEQUENCE
  Engineered albumin binding polypeptide
LAEAKVLANRELDKYGKSDYYKRLINRARTVEGVDTLKHHILAAKP

SEQ ID NO: 889 - protein, 46 aa, ARTIFICIAL SEQUENCE
  Engineered albumin binding polypeptide
LAEAKVLANRELDKYGCSDFYKRVINRARTVEGVQALKAHILAAKP

SEQ ID NO: 890 - protein, 46 aa, ARTIFICIAL SEQUENCE
  Engineered albumin binding polypeptide
LAEAKVLANRELDKYGKSDFYKRVINRARTVEGVQALKAHILAACP

SEQ ID NO: 891 - protein, 46 aa, ARTIFICIAL SEQUENCE
  Engineered albumin binding polypeptide
LAEAKVLANRELDKYGCSDFYKRVINRARTVEGVQALKAHILAACP

SEQ ID NO: 892 - protein, 46 aa, ARTIFICIAL SEQUENCE
  Engineered albumin binding polypeptide
LAEAKVLANRELDKYGKSDFYKRVINRARTVEGVQALKAHILAAKP

SEQ ID NO: 893 - protein, 46 aa, ARTIFICIAL SEQUENCE
  Engineered albumin binding polypeptide
LAEAKVLANRELDKYGCSDFYKRLINRAKTVEGVESLKAHILAAKP

SEQ ID NO: 894 - protein, 46 aa, ARTIFICIAL SEQUENCE
  Engineered albumin binding polypeptide
LAEAKVLANRELDKYGKSDFYKRLINRAKTVEGVESLKAHILAACP

SEQ ID NO: 895 - protein, 46 aa, ARTIFICIAL SEQUENCE
  Engineered albumin binding polypeptide
LAEAKVLANRELDKYGCSDFYKRLINRAKTVEGVESLKAHILAACP

SEQ ID NO: 896 - protein, 46 aa, ARTIFICIAL SEQUENCE
  Engineered albumin binding polypeptide
LAEAKVLANRELDKYGKSDFYKRLINRAKTVEGVESLKAHILAAKP

SEQ ID NO: 897 - protein, 46 aa, ARTIFICIAL SEQUENCE
  Engineered albumin binding polypeptide
LAEAKVLANRELDKYGCSDFYKRLINRARTVEGVDSLKVHILAAKP

SEQ ID NO: 898 - protein, 46 aa, ARTIFICIAL SEQUENCE
  Engineered albumin binding polypeptide
LAEAKVLANRELDKYGKSDFYKRLINRARTVEGVDSLKVHILAACP

SEQ ID NO: 899 - protein, 46 aa, ARTIFICIAL SEQUENCE
  Engineered albumin binding polypeptide
LAEAKVLANRELDKYGCSDFYKRLINRARTVEGVDSLKVHILAACP

SEQ ID NO: 900 - protein, 46 aa, ARTIFICIAL SEQUENCE
  Engineered albumin binding polypeptide
LAEAKVLANRELDKYGKSDFYKRLINRARTVEGVDSLKVHILAAKP

SEQ ID NO: 901 - protein, 46 aa, ARTIFICIAL SEQUENCE
  Engineered albumin binding polypeptide
LAEAKVLANRELDKYGCSDFYKRVINRAKTVEGVSALKRHILAAKP

SEQ ID NO: 902 - protein, 46 aa, ARTIFICIAL SEQUENCE
  Engineered albumin binding polypeptide
LAEAKVLANRELDKYGKSDFYKRVINRAKTVEGVSALKRHILAACP

SEQ ID NO: 903 - protein, 46 aa, ARTIFICIAL SEQUENCE
  Engineered albumin binding polypeptide
LAEAKVLANRELDKYGCSDFYKRVINRAKTVEGVSALKRHILAACP

SEQ ID NO: 904 - protein, 46 aa, ARTIFICIAL SEQUENCE
  Engineered albumin binding polypeptide
LAEAKVLANRELDKYGKSDFYKRVINRAKTVEGVSALKRHILAAKP

SEQ ID NO: 905 - protein, 46 aa, ARTIFICIAL SEQUENCE
  Engineered albumin binding polypeptide
LAEAKVLANRELDKYGCSDFYKRLINRAKTVEGVNALKSHILAAKP

SEQ ID NO: 906 - protein, 46 aa, ARTIFICIAL SEQUENCE
  Engineered albumin binding polypeptide
LAEAKVLANRELDKYGKSDFYKRLINRAKTVEGVNALKSHILAACP

SEQ ID NO: 907 - protein, 46 aa, ARTIFICIAL SEQUENCE
  Engineered albumin binding polypeptide
LAEAKVLANRELDKYGCSDFYKRLINRAKTVEGVNALKSHILAACP

SEQ ID NO: 908 - protein, 46 aa, ARTIFICIAL SEQUENCE
  Engineered albumin binding polypeptide
LAEAKVLANRELDKYGKSDFYKRLINRAKTVEGVNALKSHILAAKP

SEQ ID NO: 909 - protein, 46 aa, ARTIFICIAL SEQUENCE
  Engineered albumin binding polypeptide
LAEAKVLANRELDKYGCSDFYKRLINRAKTVEGVSALKQHILAAKP

SEQ ID NO: 910 - protein, 46 aa, ARTIFICIAL SEQUENCE
  Engineered albumin binding polypeptide
LAEAKVLANRELDKYGKSDFYKRLINRAKTVEGVSALKQHILAACP

SEQ ID NO: 911 - protein, 46 aa, ARTIFICIAL SEQUENCE
  Engineered albumin binding polypeptide
LAEAKVLANRELDKYGCSDFYKRLINRAKTVEGVSALKQHILAACP

SEQ ID NO: 912 - protein, 46 aa, ARTIFICIAL SEQUENCE
  Engineered albumin binding polypeptide
LAEAKVLANRELDKYGKSDFYKRLINRAKTVEGVSALKQHILAAKP

SEQ ID NO: 913 - protein, 46 aa, ARTIFICIAL SEQUENCE
  Engineered albumin binding polypeptide
LAEAKVLANRELDKYGCSDFYKRVINKAKTVEGVEALKAHILAAKP

SEQ ID NO: 914 - protein, 46 aa, ARTIFICIAL SEQUENCE
  Engineered albumin binding polypeptide
LAEAKVLANRELDKYGKSDFYKRVINKAKTVEGVEALKAHILAACP

SEQ ID NO: 915 - protein, 46 aa, ARTIFICIAL SEQUENCE
  Engineered albumin binding polypeptide
LAEAKVLANRELDKYGCSDFYKRVINKAKTVEGVEALKAHILAACP

SEQ ID NO: 916 - protein, 46 aa, ARTIFICIAL SEQUENCE
  Engineered albumin binding polypeptide
LAEAKVLANRELDKYGKSDFYKRVINKAKTVEGVEALKAHILAAKP

SEQ ID NO: 917 - protein, 46 aa, ARTIFICIAL SEQUENCE
  Engineered albumin binding polypeptide
LAEAKVLANRELDKYGCSDFYKRLINRAKTVEGVETLKRHILAAKP

SEQ ID NO: 918 - protein, 46 aa, ARTIFICIAL SEQUENCE
  Engineered albumin binding polypeptide
LAEAKVLANRELDKYGKSDFYKRLINRAKTVEGVETLKRHILAACP

SEQ ID NO: 919 - protein, 46 aa, ARTIFICIAL SEQUENCE
  Engineered albumin binding polypeptide
LAEAKVLANRELDKYGCSDFYKRLINRAKTVEGVETLKRHILAACP

SEQ ID NO: 920 - protein, 46 aa, ARTIFICIAL SEQUENCE
  Engineered albumin binding polypeptide
LAEAKVLANRELDKYGKSDFYKRLINRAKTVEGVETLKRHILAAKP

SEQ ID NO: 921 - protein, 46 aa, ARTIFICIAL SEQUENCE
  Engineered albumin binding polypeptide
LAEAKVLANRELDKYGCSDFYKRLINRARTVEGVQTLKTHILAAKP

SEQ ID NO: 922 - protein, 46 aa, ARTIFICIAL SEQUENCE
  Engineered albumin binding polypeptide
LAEAKVLANRELDKYGKSDFYKRLINRARTVEGVQTLKTHILAACP

SEQ ID NO: 923 - protein, 46 aa, ARTIFICIAL SEQUENCE
  Engineered albumin binding polypeptide
LAEAKVLANRELDKYGCSDFYKRLINRARTVEGVQTLKTHILAACP

SEQ ID NO: 924 - protein, 46 aa, ARTIFICIAL SEQUENCE
  Engineered albumin binding polypeptide
LAEAKVLANRELDKYGKSDFYKRLINRARTVEGVQTLKTHILAAKP

SEQ ID NO: 925 - protein, 46 aa, ARTIFICIAL SEQUENCE
  Engineered albumin binding polypeptide
LAEAKVLANRELDKYGCSDFYKRLINKAKTVEGVEALKLHILAAKP

SEQ ID NO: 926 - protein, 46 aa, ARTIFICIAL SEQUENCE
  Engineered albumin binding polypeptide
LAEAKVLANRELDKYGKSDFYKRLINKAKTVEGVEALKLHILAACP

SEQ ID NO: 927 - protein, 46 aa, ARTIFICIAL SEQUENCE
  Engineered albumin binding polypeptide
LAEAKVLANRELDKYGCSDFYKRLINKAKTVEGVEALKLHILAACP

SEQ ID NO: 928 - protein, 46 aa, ARTIFICIAL SEQUENCE
  Engineered albumin binding polypeptide
LAEAKVLANRELDKYGKSDFYKRLINKAKTVEGVEALKLHILAAKP

SEQ ID NO: 929 - protein, 46 aa, ARTIFICIAL SEQUENCE
  Engineered albumin binding polypeptide
LAEAKVLANRELDKYGCSDYYKNLINRARTVEGVEALKLHILAAKP

SEQ ID NO: 930 - protein, 46 aa, ARTIFICIAL SEQUENCE
  Engineered albumin binding polypeptide
LAEAKVLANRELDKYGKSDYYKNLINRARTVEGVEALKLHILAACP

SEQ ID NO: 931 - protein, 46 aa, ARTIFICIAL SEQUENCE
  Engineered albumin binding polypeptide
LAEAKVLANRELDKYGCSDYYKNLINRARTVEGVEALKLHILAACP

SEQ ID NO: 932 - protein, 46 aa, ARTIFICIAL SEQUENCE
  Engineered albumin binding polypeptide
LAEAKVLANRELDKYGKSDYYKNLINRARTVEGVEALKLHILAAKP

SEQ ID NO: 933 - protein, 46 aa, ARTIFICIAL SEQUENCE
  Engineered albumin binding polypeptide
LAEAKVLANRELDKYGCSDYYKNIINRAKTVEGVEALKLHILAAKP

SEQ ID NO: 934 - protein, 46 aa, ARTIFICIAL SEQUENCE
  Engineered albumin binding polypeptide
LAEAKVLANRELDKYGKSDYYKNIINRAKTVEGVEALKLHILAACP

SEQ ID NO: 935 - protein, 46 aa, ARTIFICIAL SEQUENCE
  Engineered albumin binding polypeptide
LAEAKVLANRELDKYGCSDYYKNIINRAKTVEGVEALKLHILAACP

SEQ ID NO: 936 - protein, 46 aa, ARTIFICIAL SEQUENCE
  Engineered albumin binding polypeptide
LAEAKVLANRELDKYGKSDYYKNIINRAKTVEGVEALKLHILAAKP

SEQ ID NO: 937 - protein, 46 aa, ARTIFICIAL SEQUENCE
  Engineered albumin binding polypeptide
LAEAKVLANRELDKYGCSDFYKNLINRAKTVEGVEALKLHILAAKP

SEQ ID NO: 938 - protein, 46 aa, ARTIFICIAL SEQUENCE
  Engineered albumin binding polypeptide
LAEAKVLANRELDKYGKSDFYKNLINRAKTVEGVEALKLHILAACP

SEQ ID NO: 939 - protein, 46 aa, ARTIFICIAL SEQUENCE
  Engineered albumin binding polypeptide
LAEAKVLANRELDKYGCSDFYKNLINRAKTVEGVEALKLHILAACP

SEQ ID NO: 940 - protein, 46 aa, ARTIFICIAL SEQUENCE
  Engineered albumin binding polypeptide
LAEAKVLANRELDKYGKSDFYKNLINRAKTVEGVEALKLHILAAKP

SEQ ID NO: 941 - protein, 46 aa, ARTIFICIAL SEQUENCE
  Engineered albumin binding polypeptide
LAEAKVLANRELDKYGCSDFYKNVINKAKTVEGVEALKLHILAAKP

SEQ ID NO: 942 - protein, 46 aa, ARTIFICIAL SEQUENCE
  Engineered albumin binding polypeptide
LAEAKVLANRELDKYGKSDFYKNVINKAKTVEGVEALKLHILAACP

SEQ ID NO: 943 - protein, 46 aa, ARTIFICIAL SEQUENCE
  Engineered albumin binding polypeptide
LAEAKVLANRELDKYGCSDFYKNVINKAKTVEGVEALKLHILAACP

SEQ ID NO: 944 - protein, 46 aa, ARTIFICIAL SEQUENCE
  Engineered albumin binding polypeptide
LAEAKVLANRELDKYGKSDFYKNVINKAKTVEGVEALKLHILAAKP

SEQ ID NO: 945 - protein, 46 aa, ARTIFICIAL SEQUENCE
  Engineered albumin binding polypeptide
LAEAKVLANRELDKYGCSDYYKNLINRAKTVEGVEALKLHILAAKP

SEQ ID NO: 946 - protein, 46 aa, ARTIFICIAL SEQUENCE
  Engineered albumin binding polypeptide
LAEAKVLANRELDKYGKSDYYKNLINRAKTVEGVEALKLHILAACP

SEQ ID NO: 947 - protein, 46 aa, ARTIFICIAL SEQUENCE
  Engineered albumin binding polypeptide
LAEAKVLANRELDKYGCSDYYKNLINRAKTVEGVEALKLHILAACP

SEQ ID NO: 948 - protein, 46 aa, ARTIFICIAL SEQUENCE
  Engineered albumin binding polypeptide
LAEAKVLANRELDKYGKSDYYKNLINRAKTVEGVEALKLHILAAKP

SEQ ID NO: 949 - protein, 46 aa, ARTIFICIAL SEQUENCE
  Engineered albumin binding polypeptide
LAEAKVLANRELDKYGCSDYYKNLINRARTVEGVHALIDHILAAKP

SEQ ID NO: 950 - protein, 46 aa, ARTIFICIAL SEQUENCE
  Engineered albumin binding polypeptide
LAEAKVLANRELDKYGKSDYYKNLINRARTVEGVHALIDHILAACP

SEQ ID NO: 951 - protein, 46 aa, ARTIFICIAL SEQUENCE
  Engineered albumin binding polypeptide
LAEAKVLANRELDKYGCSDYYKNLINRARTVEGVHALIDHILAACP

SEQ ID NO: 952 - protein, 46 aa, ARTIFICIAL SEQUENCE
  Engineered albumin binding polypeptide
LAEAKVLANRELDKYGKSDYYKNLINRARTVEGVHALIDHILAAKP

SEQ ID NO: 953 - protein, 46 aa, ARTIFICIAL SEQUENCE
  Engineered albumin binding polypeptide
LAEAKVLANRELDKYGCSDYYKNLINNAKTVEGVKALIDEILAAKP

SEQ ID NO: 954 - protein, 46 aa, ARTIFICIAL SEQUENCE
  Engineered albumin binding polypeptide
LAEAKVLANRELDKYGKSDYYKNLINNAKTVEGVKALIDEILAACP

SEQ ID NO: 955 - protein, 46 aa, ARTIFICIAL SEQUENCE
  Engineered albumin binding polypeptide
LAEAKVLANRELDKYGCSDYYKNLINNAKTVEGVKALIDEILAACP

SEQ ID NO: 956 - protein, 46 aa, ARTIFICIAL SEQUENCE
  Engineered albumin binding polypeptide
LAEAKVLANRELDKYGKSDYYKNLINNAKTVEGVKALIDEILAAKP

SEQ ID NO: 957 - protein, 46 aa, ARTIFICIAL SEQUENCE
  Engineered albumin binding polypeptide
LAEAKVLALRELDKYGCSDFYKRLINKAKTVEGVEALKLHILAAKP

SEQ ID NO: 958 - protein, 46 aa, ARTIFICIAL SEQUENCE
  Engineered albumin binding polypeptide
LAEAKVLALRELDKYGKSDFYKRLINKAKTVEGVEALKLHILAACP

SEQ ID NO: 959 - protein, 46 aa, ARTIFICIAL SEQUENCE
  Engineered albumin binding polypeptide
LAEAKVLALRELDKYGCSDFYKRLINKAKTVEGVEALKLHILAACP

SEQ ID NO: 960 - protein, 46 aa, ARTIFICIAL SEQUENCE
  Engineered albumin binding polypeptide
LAEAKVLALRELDKYGKSDFYKRLINKAKTVEGVEALKLHILAAKP

SEQ ID NO: 961 - protein, 46 aa, ARTIFICIAL SEQUENCE
  Engineered albumin binding polypeptide
LAEAKVLALRELDKYGCSDYYKRLISKAKTVEGVKALISEILAAKP

SEQ ID NO: 962 - protein, 46 aa, ARTIFICIAL SEQUENCE
  Engineered albumin binding polypeptide
LAEAKVLALRELDKYGKSDYYKRLISKAKTVEGVKALISEILAACP

SEQ ID NO: 963 - protein, 46 aa, ARTIFICIAL SEQUENCE
  Engineered albumin binding polypeptide
LAEAKVLALRELDKYGCSDYYKRLISKAKTVEGVKALISEILAACP

SEQ ID NO: 964 - protein, 46 aa, ARTIFICIAL SEQUENCE
  Engineered albumin binding polypeptide
LAEAKVLALRELDKYGKSDYYKRLISKAKTVEGVKALISEILAAKP

SEQ ID NO: 965 - protein, 46 aa, ARTIFICIAL SEQUENCE
  Engineered albumin binding polypeptide
LAEAKVLAIRELDKYGCSDFYKRLINKAKTVEGVEALKLHILAAKP

SEQ ID NO: 966 - protein, 46 aa, ARTIFICIAL SEQUENCE
  Engineered albumin binding polypeptide
LAEAKVLAIRELDKYGKSDFYKRLINKAKTVEGVEALKLHILAACP

SEQ ID NO: 967 - protein, 46 aa, ARTIFICIAL SEQUENCE
  Engineered albumin binding polypeptide
LAEAKVLAIRELDKYGCSDFYKRLINKAKTVEGVEALKLHILAACP

SEQ ID NO: 968 - protein, 46 aa, ARTIFICIAL SEQUENCE
  Engineered albumin binding polypeptide
LAEAKVLAIRELDKYGKSDFYKRLINKAKTVEGVEALKLHILAAKP

SEQ ID NO: 969 - protein, 46 aa, ARTIFICIAL SEQUENCE
  Engineered albumin binding polypeptide
LAEAKVLAIRELDKYGCSDYYKRLISKAKTVEGVKALISEILAAKP

SEQ ID NO: 970 - protein, 46 aa, ARTIFICIAL SEQUENCE
  Engineered albumin binding polypeptide
LAEAKVLAIRELDKYGKSDYYKRLISKAKTVEGVKALISEILAACP

SEQ ID NO: 971 - protein, 46 aa, ARTIFICIAL SEQUENCE
  Engineered albumin binding polypeptide
LAEAKVLAIRELDKYGCSDYYKRLISKAKTVEGVKALISEILAACP

SEQ ID NO: 972 - protein, 46 aa, ARTIFICIAL SEQUENCE
  Engineered albumin binding polypeptide
LAEAKVLAIRELDKYGKSDYYKRLISKAKTVEGVKALISEILAAKP

SEQ ID NO: 973 - protein, 46 aa, ARTIFICIAL SEQUENCE
  Engineered albumin binding polypeptide
LAEAKVLAIKELDKYGCSDYYKRLISKAKTVEGVKALISEILAAKP

SEQ ID NO: 974 - protein, 46 aa, ARTIFICIAL SEQUENCE
  Engineered albumin binding polypeptide
LAEAKVLAIKELDKYGKSDYYKRLISKAKTVEGVKALISEILAACP

SEQ ID NO: 975 - protein, 46 aa, ARTIFICIAL SEQUENCE
  Engineered albumin binding polypeptide
LAEAKVLAIKELDKYGCSDYYKRLISKAKTVEGVKALISEILAACP

SEQ ID NO: 976 - protein, 46 aa, ARTIFICIAL SEQUENCE
  Engineered albumin binding polypeptide
LAEAKVLAIKELDKYGKSDYYKRLISKAKTVEGVKALISEILAAKP

SEQ ID NO: 977 - protein, 46 aa, ARTIFICIAL SEQUENCE
  Engineered albumin binding polypeptide
LAEAKELANRELDKYGCSDYYKRLISKAKTVEGVKALISEILAAKP

SEQ ID NO: 978 - protein, 46 aa, ARTIFICIAL SEQUENCE
  Engineered albumin binding polypeptide
LAEAKELANRELDKYGKSDYYKRLISKAKTVEGVKALISEILAACP

SEQ ID NO: 979 - protein, 46 aa, ARTIFICIAL SEQUENCE
  Engineered albumin binding polypeptide
LAEAKELANRELDKYGCSDYYKRLISKAKTVEGVKALISEILAACP

SEQ ID NO: 980 - protein, 46 aa, ARTIFICIAL SEQUENCE
  Engineered albumin binding polypeptide
LAEAKELANRELDKYGKSDYYKRLISKAKTVEGVKALISEILAAKP

SEQ ID NO: 981 - protein, 46 aa, ARTIFICIAL SEQUENCE
  Engineered albumin binding polypeptide
LAEAKVDANRELDKYGCSDYYKRLISKAKTVEGVKALISEILAAKP

SEQ ID NO: 982 - protein, 46 aa, ARTIFICIAL SEQUENCE
  Engineered albumin binding polypeptide
LAEAKVDANRELDKYGKSDYYKRLISKAKTVEGVKALISEILAACP

SEQ ID NO: 983 - protein, 46 aa, ARTIFICIAL SEQUENCE
  Engineered albumin binding polypeptide
LAEAKVDANRELDKYGCSDYYKRLISKAKTVEGVKALISEILAACP

SEQ ID NO: 984 - protein, 46 aa, ARTIFICIAL SEQUENCE
  Engineered albumin binding polypeptide
LAEAKVDANRELDKYGKSDYYKRLISKAKTVEGVKALISEILAAKP

SEQ ID NO: 985 - protein, 46 aa, ARTIFICIAL SEQUENCE
  Engineered albumin binding polypeptide
LAEAKEDANRELDKYGCSDYYKRLISKAKTVEGVKALISEILAAKP

SEQ ID NO: 986 - protein, 46 aa, ARTIFICIAL SEQUENCE
  Engineered albumin binding polypeptide
LAEAKEDANRELDKYGKSDYYKRLISKAKTVEGVKALISEILAACP

SEQ ID NO: 987 - protein, 46 aa, ARTIFICIAL SEQUENCE
  Engineered albumin binding polypeptide
LAEAKEDANRELDKYGCSDYYKRLISKAKTVEGVKALISEILAACP

SEQ ID NO: 988 - protein, 46 aa, ARTIFICIAL SEQUENCE
  Engineered albumin binding polypeptide
LAEAKEDANRELDKYGKSDYYKRLISKAKTVEGVKALISEILAAKP

SEQ ID NO: 989 - protein, 46 aa, ARTIFICIAL SEQUENCE
  Engineered albumin binding polypeptide
LAEAKEDAIKELDKYGCSDYYKRLISKAKTVEGVKALISEILAAKP

SEQ ID NO: 990 - protein, 46 aa, ARTIFICIAL SEQUENCE
  Engineered albumin binding polypeptide
LAEAKEDAIKELDKYGKSDYYKRLISKAKTVEGVKALISEILAACP

SEQ ID NO: 991 - protein, 46 aa, ARTIFICIAL SEQUENCE
  Engineered albumin binding polypeptide
LAEAKEDAIKELDKYGCSDYYKRLISKAKTVEGVKALISEILAACP

SEQ ID NO: 992 - protein, 46 aa, ARTIFICIAL SEQUENCE
  Engineered albumin binding polypeptide
LAEAKEDAIKELDKYGKSDYYKRLISKAKTVEGVKALISEILAAKP

SEQ ID NO: 993 - protein, 46 aa, ARTIFICIAL SEQUENCE
  Engineered albumin binding polypeptide
LAEAKVLALKELDKYGCSDYYKRLISKAKTVEGVKALISEILAAKP

SEQ ID NO: 994 - protein, 46 aa, ARTIFICIAL SEQUENCE
  Engineered albumin binding polypeptide
LAEAKVLALKELDKYGKSDYYKRLISKAKTVEGVKALISEILAACP

SEQ ID NO: 995 - protein, 46 aa, ARTIFICIAL SEQUENCE
  Engineered albumin binding polypeptide
LAEAKVLALKELDKYGCSDYYKRLISKAKTVEGVKALISEILAACP

SEQ ID NO: 996 - protein, 46 aa, ARTIFICIAL SEQUENCE
  Engineered albumin binding polypeptide
LAEAKVLALKELDKYGKSDYYKRLISKAKTVEGVKALISEILAAKP

SEQ ID NO: 997 - protein, 46 aa, ARTIFICIAL SEQUENCE
  Engineered albumin binding polypeptide
LAEAKELAIKELDKYGCSDYYKRLISKAKTVEGVKALISEILAAKP

SEQ ID NO: 998 - protein, 46 aa, ARTIFICIAL SEQUENCE
  Engineered albumin binding polypeptide
LAEAKELAIKELDKYGKSDYYKRLISKAKTVEGVKALISEILAACP

SEQ ID NO: 999 - protein, 46 aa, ARTIFICIAL SEQUENCE
  Engineered albumin binding polypeptide
LAEAKELAIKELDKYGCSDYYKRLISKAKTVEGVKALISEILAACP

SEQ ID NO: 1000 - protein, 46 aa, ARTIFICIAL SEQUENCE
  Engineered albumin binding polypeptide
LAEAKELAIKELDKYGKSDYYKRLISKAKTVEGVKALISEILAAKP

SEQ ID NO: 1001 - protein, 46 aa, ARTIFICIAL SEQUENCE
  Engineered albumin binding polypeptide
LAEAKVDAIKELDKYGCSDYYKRLISKAKTVEGVKALISEILAAKP

SEQ ID NO: 1002 - protein, 46 aa, ARTIFICIAL SEQUENCE
  Engineered albumin binding polypeptide
LAEAKVDAIKELDKYGKSDYYKRLISKAKTVEGVKALISEILAACP

SEQ ID NO: 1003 - protein, 46 aa, ARTIFICIAL SEQUENCE
  Engineered albumin binding polypeptide
LAEAKVDAIKELDKYGCSDYYKRLISKAKTVEGVKALISEILAACP

SEQ ID NO: 1004 - protein, 46 aa, ARTIFICIAL SEQUENCE
  Engineered albumin binding polypeptide
LAEAKVDAIKELDKYGKSDYYKRLISKAKTVEGVKALISEILAAKP

SEQ ID NO: 1005 - protein, 46 aa, ARTIFICIAL SEQUENCE
  Engineered albumin binding polypeptide
LASAKEAANAELDAYGCSDFYKRLIDKAKTVEGVEALKDAILAAKP

SEQ ID NO: 1006 - protein, 46 aa, ARTIFICIAL SEQUENCE
  Engineered albumin binding polypeptide
LASAKEAANAELDAYGKSDFYKRLIDKAKTVEGVEALKDAILAACP

SEQ ID NO: 1007 - protein, 46 aa, ARTIFICIAL SEQUENCE
  Engineered albumin binding polypeptide
LASAKEAANAELDAYGCSDFYKRLIDKAKTVEGVEALKDAILAACP

SEQ ID NO: 1008 - protein, 46 aa, ARTIFICIAL SEQUENCE
  Engineered albumin binding polypeptide
LASAKEAANAELDAYGKSDFYKRLIDKAKTVEGVEALKDAILAAKP

SEQ ID NO: 1009 - protein, 46 aa, ARTIFICIAL SEQUENCE
  Engineered albumin binding polypeptide
LASAKEAANSELDAYGCSDFYKRLIDKAKTVEGVEALKDAILAAKP

SEQ ID NO: 1010 - protein, 46 aa, ARTIFICIAL SEQUENCE
  Engineered albumin binding polypeptide
LASAKEAANSELDAYGKSDFYKRLIDKAKTVEGVEALKDAILAACP

SEQ ID NO: 1011 - protein, 46 aa, ARTIFICIAL SEQUENCE
  Engineered albumin binding polypeptide
LASAKEAANSELDAYGCSDFYKRLIDKAKTVEGVEALKDAILAACP

SEQ ID NO: 1012 - protein, 46 aa, ARTIFICIAL SEQUENCE
  Engineered albumin binding polypeptide
LASAKEAANSELDAYGKSDFYKRLIDKAKTVEGVEALKDAILAAKP

SEQ ID NO: 1013 - protein, 46 aa, ARTIFICIAL SEQUENCE
  Engineered albumin binding polypeptide
LASAKESANSELDAYGCSDFYKRLIDKAKTVEGVEALKDAILAAKP

SEQ ID NO: 1014 - protein, 46 aa, ARTIFICIAL SEQUENCE
  Engineered albumin binding polypeptide
LASAKESANSELDAYGKSDFYKRLIDKAKTVEGVEALKDAILAACP

SEQ ID NO: 1015 - protein, 46 aa, ARTIFICIAL SEQUENCE
  Engineered albumin binding polypeptide
LASAKESANSELDAYGCSDFYKRLIDKAKTVEGVEALKDAILAACP

SEQ ID NO: 1016 - protein, 46 aa, ARTIFICIAL SEQUENCE
  Engineered albumin binding polypeptide
LASAKESANSELDAYGKSDFYKRLIDKAKTVEGVEALKDAILAAKP

SEQ ID NO: 1017 - protein, 46 aa, ARTIFICIAL SEQUENCE
  Engineered albumin binding polypeptide
LASAKESANAELDAYGCSDFYKRLIDKAKTVEGVEALKDAILAAKP

SEQ ID NO: 1018 - protein, 46 aa, ARTIFICIAL SEQUENCE
  Engineered albumin binding polypeptide
LASAKESANAELDAYGKSDFYKRLIDKAKTVEGVEALKDAILAACP

SEQ ID NO: 1019 - protein, 46 aa, ARTIFICIAL SEQUENCE
  Engineered albumin binding polypeptide
LASAKESANAELDAYGCSDFYKRLIDKAKTVEGVEALKDAILAACP

SEQ ID NO: 1020 - protein, 46 aa, ARTIFICIAL SEQUENCE
  Engineered albumin binding polypeptide
LASAKESANAELDAYGKSDFYKRLIDKAKTVEGVEALKDAILAAKP

SEQ ID NO: 1021 - protein, 46 aa, ARTIFICIAL SEQUENCE
  Engineered albumin binding polypeptide
LASAKSAANAELDAYGCSDFYKRLIDKAKTVEGVEALKDAILAAKP

SEQ ID NO: 1022 - protein, 46 aa, ARTIFICIAL SEQUENCE
  Engineered albumin binding polypeptide
LASAKSAANAELDAYGKSDFYKRLIDKAKTVEGVEALKDAILAACP

SEQ ID NO: 1023 - protein, 46 aa, ARTIFICIAL SEQUENCE
  Engineered albumin binding polypeptide
LASAKSAANAELDAYGCSDFYKRLIDKAKTVEGVEALKDAILAACP

SEQ ID NO: 1024 - protein, 46 aa, ARTIFICIAL SEQUENCE
  Engineered albumin binding polypeptide
LASAKSAANAELDAYGKSDFYKRLIDKAKTVEGVEALKDAILAAKP

SEQ ID NO: 1025 - protein, 46 aa, ARTIFICIAL SEQUENCE
  Engineered albumin binding polypeptide
LASAKSAANSELDAYGCSDFYKRLIDKAKTVEGVEALKDAILAAKP

SEQ ID NO: 1026 - protein, 46 aa, ARTIFICIAL SEQUENCE
  Engineered albumin binding polypeptide
LASAKSAANSELDAYGKSDFYKRLIDKAKTVEGVEALKDAILAACP

SEQ ID NO: 1027 - protein, 46 aa, ARTIFICIAL SEQUENCE
  Engineered albumin binding polypeptide
LASAKSAANSELDAYGCSDFYKRLIDKAKTVEGVEALKDAILAACP

SEQ ID NO: 1028 - protein, 46 aa, ARTIFICIAL SEQUENCE
  Engineered albumin binding polypeptide
LASAKSAANSELDAYGKSDFYKRLIDKAKTVEGVEALKDAILAAKP

SEQ ID NO: 1029 - protein, 46 aa, ARTIFICIAL SEQUENCE
  Engineered albumin binding polypeptide
LASAKEAANAELDSYGCSDFYKRLIDKAKTVEGVEALKDAILAAKP

SEQ ID NO: 1030 - protein, 46 aa, ARTIFICIAL SEQUENCE
  Engineered albumin binding polypeptide
LASAKEAANAELDSYGKSDFYKRLIDKAKTVEGVEALKDAILAACP

SEQ ID NO: 1031 - protein, 46 aa, ARTIFICIAL SEQUENCE
  Engineered albumin binding polypeptide
LASAKEAANAELDSYGCSDFYKRLIDKAKTVEGVEALKDAILAACP

SEQ ID NO: 1032 - protein, 46 aa, ARTIFICIAL SEQUENCE
  Engineered albumin binding polypeptide
LASAKEAANAELDSYGKSDFYKRLIDKAKTVEGVEALKDAILAAKP

SEQ ID NO: 1033 - protein, 46 aa, ARTIFICIAL SEQUENCE
  Engineered albumin binding polypeptide
LASAKEAANSELDSYGCSDFYKRLIDKAKTVEGVEALKDAILAAKP

SEQ ID NO: 1034 - protein, 46 aa, ARTIFICIAL SEQUENCE
  Engineered albumin binding polypeptide
LASAKEAANSELDSYGKSDFYKRLIDKAKTVEGVEALKDAILAACP

SEQ ID NO: 1035 - protein, 46 aa, ARTIFICIAL SEQUENCE
  Engineered albumin binding polypeptide
LASAKEAANSELDSYGCSDFYKRLIDKAKTVEGVEALKDAILAACP

SEQ ID NO: 1036 - protein, 46 aa, ARTIFICIAL SEQUENCE
  Engineered albumin binding polypeptide
LASAKEAANSELDSYGKSDFYKRLIDKAKTVEGVEALKDAILAAKP

SEQ ID NO: 1037 - protein, 46 aa, ARTIFICIAL SEQUENCE
  Engineered albumin binding polypeptide
LASAKESANSELDSYGCSDFYKRLIDKAKTVEGVEALKDAILAAKP

SEQ ID NO: 1038 - protein, 46 aa, ARTIFICIAL SEQUENCE
  Engineered albumin binding polypeptide
LASAKESANSELDSYGKSDFYKRLIDKAKTVEGVEALKDAILAACP

SEQ ID NO: 1039 - protein, 46 aa, ARTIFICIAL SEQUENCE
  Engineered albumin binding polypeptide
LASAKESANSELDSYGCSDFYKRLIDKAKTVEGVEALKDAILAACP

SEQ ID NO: 1040 - protein, 46 aa, ARTIFICIAL SEQUENCE
  Engineered albumin binding polypeptide
LASAKESANSELDSYGKSDFYKRLIDKAKTVEGVEALKDAILAAKP

SEQ ID NO: 1041 - protein, 46 aa, ARTIFICIAL SEQUENCE
  Engineered albumin binding polypeptide
LASAKESANAELDSYGCSDFYKRLIDKAKTVEGVEALKDAILAAKP

SEQ ID NO: 1042 - protein, 46 aa, ARTIFICIAL SEQUENCE
  Engineered albumin binding polypeptide
LASAKESANAELDSYGKSDFYKRLIDKAKTVEGVEALKDAILAACP

SEQ ID NO: 1043 - protein, 46 aa, ARTIFICIAL SEQUENCE
  Engineered albumin binding polypeptide
LASAKESANAELDSYGCSDFYKRLIDKAKTVEGVEALKDAILAACP

SEQ ID NO: 1044 - protein, 46 aa, ARTIFICIAL SEQUENCE
  Engineered albumin binding polypeptide
LASAKESANAELDSYGKSDFYKRLIDKAKTVEGVEALKDAILAAKP

SEQ ID NO: 1045 - protein, 46 aa, ARTIFICIAL SEQUENCE
  Engineered albumin binding polypeptide
LASAKSAANAELDSYGCSDFYKRLIDKAKTVEGVEALKDAILAAKP

SEQ ID NO: 1046 - protein, 46 aa, ARTIFICIAL SEQUENCE
  Engineered albumin binding polypeptide
LASAKSAANAELDSYGKSDFYKRLIDKAKTVEGVEALKDAILAACP

SEQ ID NO: 1047 - protein, 46 aa, ARTIFICIAL SEQUENCE
  Engineered albumin binding polypeptide
LASAKSAANAELDSYGCSDFYKRLIDKAKTVEGVEALKDAILAACP

SEQ ID NO: 1048 - protein, 46 aa, ARTIFICIAL SEQUENCE
  Engineered albumin binding polypeptide
LASAKSAANAELDSYGKSDFYKRLIDKAKTVEGVEALKDAILAAKP

SEQ ID NO: 1049 - protein, 46 aa, ARTIFICIAL SEQUENCE
  Engineered albumin binding polypeptide
LASAKSAANSELDSYGCSDFYKRLIDKAKTVEGVEALKDAILAAKP

SEQ ID NO: 1050 - protein, 46 aa, ARTIFICIAL SEQUENCE
  Engineered albumin binding polypeptide
LASAKSAANSELDSYGKSDFYKRLIDKAKTVEGVEALKDAILAACP

SEQ ID NO: 1051 - protein, 46 aa, ARTIFICIAL SEQUENCE
  Engineered albumin binding polypeptide
LASAKSAANSELDSYGCSDFYKRLIDKAKTVEGVEALKDAILAACP

SEQ ID NO: 1052 - protein, 46 aa, ARTIFICIAL SEQUENCE
  Engineered albumin binding polypeptide
LASAKSAANSELDSYGKSDFYKRLIDKAKTVEGVEALKDAILAAKP

SEQ ID NO: 1053 - protein, 46 aa, ARTIFICIAL SEQUENCE
  Engineered albumin binding polypeptide
LAEAKEAANSELDSYGCSDFYKRLIDKAKTVEGVEALKDAILAAKP

SEQ ID NO: 1054 - protein, 46 aa, ARTIFICIAL SEQUENCE
  Engineered albumin binding polypeptide
LAEAKEAANSELDSYGKSDFYKRLIDKAKTVEGVEALKDAILAACP

SEQ ID NO: 1055 - protein, 46 aa, ARTIFICIAL SEQUENCE
  Engineered albumin binding polypeptide
LAEAKEAANSELDSYGCSDFYKRLIDKAKTVEGVEALKDAILAACP

SEQ ID NO: 1056 - protein, 46 aa, ARTIFICIAL SEQUENCE
  Engineered albumin binding polypeptide
LAEAKEAANSELDSYGKSDFYKRLIDKAKTVEGVEALKDAILAAKP

SEQ ID NO: 1057 - protein, 46 aa, ARTIFICIAL SEQUENCE
  Engineered albumin binding polypeptide
LAEAKESANSELDSYGCSDFYKRLIDKAKTVEGVEALKDAILAAKP

SEQ ID NO: 1058 - protein, 46 aa, ARTIFICIAL SEQUENCE
  Engineered albumin binding polypeptide
LAEAKESANSELDSYGKSDFYKRLIDKAKTVEGVEALKDAILAACP

SEQ ID NO: 1059 - protein, 46 aa, ARTIFICIAL SEQUENCE
  Engineered albumin binding polypeptide
LAEAKESANSELDSYGCSDFYKRLIDKAKTVEGVEALKDAILAACP

SEQ ID NO: 1060 - protein, 46 aa, ARTIFICIAL SEQUENCE
  Engineered albumin binding polypeptide
LAEAKESANSELDSYGKSDFYKRLIDKAKTVEGVEALKDAILAAKP

SEQ ID NO: 1061 - protein, 46 aa, ARTIFICIAL SEQUENCE
  Engineered albumin binding polypeptide
LAEAKESANAELDSYGCSDFYKRLIDKAKTVEGVEALKDAILAAKP

SEQ ID NO: 1062 - protein, 46 aa, ARTIFICIAL SEQUENCE
  Engineered albumin binding polypeptide
LAEAKESANAELDSYGKSDFYKRLIDKAKTVEGVEALKDAILAACP

SEQ ID NO: 1063 - protein, 46 aa, ARTIFICIAL SEQUENCE
  Engineered albumin binding polypeptide
LAEAKESANAELDSYGCSDFYKRLIDKAKTVEGVEALKDAILAACP

SEQ ID NO: 1064 - protein, 46 aa, ARTIFICIAL SEQUENCE
  Engineered albumin binding polypeptide
LAEAKESANAELDSYGKSDFYKRLIDKAKTVEGVEALKDAILAAKP

SEQ ID NO: 1065 - protein, 46 aa, ARTIFICIAL SEQUENCE
  Engineered albumin binding polypeptide
LAEAKSAANAELDSYGCSDFYKRLIDKAKTVEGVEALKDAILAAKP

SEQ ID NO: 1066 - protein, 46 aa, ARTIFICIAL SEQUENCE
  Engineered albumin binding polypeptide
LAEAKSAANAELDSYGKSDFYKRLIDKAKTVEGVEALKDAILAACP

SEQ ID NO: 1067 - protein, 46 aa, ARTIFICIAL SEQUENCE
  Engineered albumin binding polypeptide
LAEAKSAANAELDSYGCSDFYKRLIDKAKTVEGVEALKDAILAACP

SEQ ID NO: 1068 - protein, 46 aa, ARTIFICIAL SEQUENCE
  Engineered albumin binding polypeptide
LAEAKSAANAELDSYGKSDFYKRLIDKAKTVEGVEALKDAILAAKP

SEQ ID NO: 1069 - protein, 46 aa, ARTIFICIAL SEQUENCE
  Engineered albumin binding polypeptide
LAEAKSAANSELDSYGCSDFYKRLIDKAKTVEGVEALKDAILAAKP

SEQ ID NO: 1070 - protein, 46 aa, ARTIFICIAL SEQUENCE
  Engineered albumin binding polypeptide
LAEAKSAANSELDSYGKSDFYKRLIDKAKTVEGVEALKDAILAACP

SEQ ID NO: 1071 - protein, 46 aa, ARTIFICIAL SEQUENCE
  Engineered albumin binding polypeptide
LAEAKSAANSELDSYGCSDFYKRLIDKAKTVEGVEALKDAILAACP

SEQ ID NO: 1072 - protein, 46 aa, ARTIFICIAL SEQUENCE
  Engineered albumin binding polypeptide
LAEAKSAANSELDSYGKSDFYKRLIDKAKTVEGVEALKDAILAAKP

SEQ ID NO: 1073 - protein, 46 aa, ARTIFICIAL SEQUENCE
  Engineered albumin binding polypeptide
LAEAKEAANAELDAYGCSDFYKRLIDKAKTVEGVEALKDAILAAKP

SEQ ID NO: 1074 - protein, 46 aa, ARTIFICIAL SEQUENCE
  Engineered albumin binding polypeptide
LAEAKEAANAELDAYGKSDFYKRLIDKAKTVEGVEALKDAILAACP

SEQ ID NO: 1075 - protein, 46 aa, ARTIFICIAL SEQUENCE
  Engineered albumin binding polypeptide
LAEAKEAANAELDAYGCSDFYKRLIDKAKTVEGVEALKDAILAACP

SEQ ID NO: 1076 - protein, 46 aa, ARTIFICIAL SEQUENCE
  Engineered albumin binding polypeptide
LAEAKEAANAELDAYGKSDFYKRLIDKAKTVEGVEALKDAILAAKP

SEQ ID NO: 1077 - protein, 46 aa, ARTIFICIAL SEQUENCE
  Engineered albumin binding polypeptide
LAEAKEAANSELDAYGCSDFYKRLIDKAKTVEGVEALKDAILAAKP

SEQ ID NO: 1078 - protein, 46 aa, ARTIFICIAL SEQUENCE
  Engineered albumin binding polypeptide
LAEAKEAANSELDAYGKSDFYKRLIDKAKTVEGVEALKDAILAACP

SEQ ID NO: 1079 - protein, 46 aa, ARTIFICIAL SEQUENCE
  Engineered albumin binding polypeptide
LAEAKEAANSELDAYGCSDFYKRLIDKAKTVEGVEALKDAILAACP

SEQ ID NO: 1080 - protein, 46 aa, ARTIFICIAL SEQUENCE
  Engineered albumin binding polypeptide
LAEAKEAANSELDAYGKSDFYKRLIDKAKTVEGVEALKDAILAAKP

SEQ ID NO: 1081 - protein, 46 aa, ARTIFICIAL SEQUENCE
  Engineered albumin binding polypeptide
LAEAKESANSELDAYGCSDFYKRLIDKAKTVEGVEALKDAILAAKP

SEQ ID NO: 1082 - protein, 46 aa, ARTIFICIAL SEQUENCE
  Engineered albumin binding polypeptide
LAEAKESANSELDAYGKSDFYKRLIDKAKTVEGVEALKDAILAACP

SEQ ID NO: 1083 - protein, 46 aa, ARTIFICIAL SEQUENCE
  Engineered albumin binding polypeptide
LAEAKESANSELDAYGCSDFYKRLIDKAKTVEGVEALKDAILAACP

SEQ ID NO: 1084 - protein, 46 aa, ARTIFICIAL SEQUENCE
  Engineered albumin binding polypeptide
LAEAKESANSELDAYGKSDFYKRLIDKAKTVEGVEALKDAILAAKP

SEQ ID NO: 1085 - protein, 46 aa, ARTIFICIAL SEQUENCE
  Engineered albumin binding polypeptide
LAEAKESANAELDAYGCSDFYKRLIDKAKTVEGVEALKDAILAAKP

SEQ ID NO: 1086 - protein, 46 aa, ARTIFICIAL SEQUENCE
  Engineered albumin binding polypeptide
LAEAKESANAELDAYGKSDFYKRLIDKAKTVEGVEALKDAILAACP

SEQ ID NO: 1087 - protein, 46 aa, ARTIFICIAL SEQUENCE
  Engineered albumin binding polypeptide
LAEAKESANAELDAYGCSDFYKRLIDKAKTVEGVEALKDAILAACP

SEQ ID NO: 1088 - protein, 46 aa, ARTIFICIAL SEQUENCE
  Engineered albumin binding polypeptide
LAEAKESANAELDAYGKSDFYKRLIDKAKTVEGVEALKDAILAAKP

SEQ ID NO: 1089 - protein, 46 aa, ARTIFICIAL SEQUENCE
  Engineered albumin binding polypeptide
LAEAKSAANAELDAYGCSDFYKRLIDKAKTVEGVEALKDAILAAKP

SEQ ID NO: 1090 - protein, 46 aa, ARTIFICIAL SEQUENCE
  Engineered albumin binding polypeptide
LAEAKSAANAELDAYGKSDFYKRLIDKAKTVEGVEALKDAILAACP

SEQ ID NO: 1091 - protein, 46 aa, ARTIFICIAL SEQUENCE
  Engineered albumin binding polypeptide
LAEAKSAANAELDAYGCSDFYKRLIDKAKTVEGVEALKDAILAACP

SEQ ID NO: 1092 - protein, 46 aa, ARTIFICIAL SEQUENCE
  Engineered albumin binding polypeptide
LAEAKSAANAELDAYGKSDFYKRLIDKAKTVEGVEALKDAILAAKP

SEQ ID NO: 1093 - protein, 46 aa, ARTIFICIAL SEQUENCE
  Engineered albumin binding polypeptide
LAEAKSAANSELDAYGCSDFYKRLIDKAKTVEGVEALKDAILAAKP

SEQ ID NO: 1094 - protein, 46 aa, ARTIFICIAL SEQUENCE
  Engineered albumin binding polypeptide
LAEAKSAANSELDAYGKSDFYKRLIDKAKTVEGVEALKDAILAACP

SEQ ID NO: 1095 - protein, 46 aa, ARTIFICIAL SEQUENCE
  Engineered albumin binding polypeptide
LAEAKSAANSELDAYGCSDFYKRLIDKAKTVEGVEALKDAILAACP

SEQ ID NO: 1096 - protein, 46 aa, ARTIFICIAL SEQUENCE
  Engineered albumin binding polypeptide
LAEAKSAANSELDAYGKSDFYKRLIDKAKTVEGVEALKDAILAAKP

SEQ ID NO: 1097 - protein, 46 aa, ARTIFICIAL SEQUENCE
  Engineered albumin binding polypeptide
LAQAKEAANAELDAYGCSDFYKRLIDKAKTVEGVEALKDAILAAKP

SEQ ID NO: 1098 - protein, 46 aa, ARTIFICIAL SEQUENCE
  Engineered albumin binding polypeptide
LAQAKEAANAELDAYGKSDFYKRLIDKAKTVEGVEALKDAILAACP

SEQ ID NO: 1099 - protein, 46 aa, ARTIFICIAL SEQUENCE
  Engineered albumin binding polypeptide
LAQAKEAANAELDAYGCSDFYKRLIDKAKTVEGVEALKDAILAACP

SEQ ID NO: 1100 - protein, 46 aa, ARTIFICIAL SEQUENCE
  Engineered albumin binding polypeptide
LAQAKEAANAELDAYGKSDFYKRLIDKAKTVEGVEALKDAILAAKP

SEQ ID NO: 1101 - protein, 46 aa, ARTIFICIAL SEQUENCE
  Engineered albumin binding polypeptide
LAQAKEAANSELDAYGCSDFYKRLIDKAKTVEGVEALKDAILAAKP

SEQ ID NO: 1102 - protein, 46 aa, ARTIFICIAL SEQUENCE
  Engineered albumin binding polypeptide
LAQAKEAANSELDAYGKSDFYKRLIDKAKTVEGVEALKDAILAACP

SEQ ID NO: 1103 - protein, 46 aa, ARTIFICIAL SEQUENCE
  Engineered albumin binding polypeptide
LAQAKEAANSELDAYGCSDFYKRLIDKAKTVEGVEALKDAILAACP

SEQ ID NO: 1104 - protein, 46 aa, ARTIFICIAL SEQUENCE
  Engineered albumin binding polypeptide
LAQAKEAANSELDAYGKSDFYKRLIDKAKTVEGVEALKDAILAAKP

SEQ ID NO: 1105 - protein, 46 aa, ARTIFICIAL SEQUENCE
  Engineered albumin binding polypeptide
LAQAKESANSELDAYGCSDFYKRLIDKAKTVEGVEALKDAILAAKP

SEQ ID NO: 1106 - protein, 46 aa, ARTIFICIAL SEQUENCE
  Engineered albumin binding polypeptide
LAQAKESANSELDAYGKSDFYKRLIDKAKTVEGVEALKDAILAACP

SEQ ID NO: 1107 - protein, 46 aa, ARTIFICIAL SEQUENCE
  Engineered albumin binding polypeptide
LAQAKESANSELDAYGCSDFYKRLIDKAKTVEGVEALKDAILAACP

SEQ ID NO: 1108 - protein, 46 aa, ARTIFICIAL SEQUENCE
  Engineered albumin binding polypeptide
LAQAKESANSELDAYGKSDFYKRLIDKAKTVEGVEALKDAILAAKP

SEQ ID NO: 1109 - protein, 46 aa, ARTIFICIAL SEQUENCE
  Engineered albumin binding polypeptide
LAQAKESANAELDAYGCSDFYKRLIDKAKTVEGVEALKDAILAAKP

SEQ ID NO: 1110 - protein, 46 aa, ARTIFICIAL SEQUENCE
  Engineered albumin binding polypeptide
LAQAKESANAELDAYGKSDFYKRLIDKAKTVEGVEALKDAILAACP

SEQ ID NO: 1111 - protein, 46 aa, ARTIFICIAL SEQUENCE
  Engineered albumin binding polypeptide
LAQAKESANAELDAYGCSDFYKRLIDKAKTVEGVEALKDAILAACP

SEQ ID NO: 1112 - protein, 46 aa, ARTIFICIAL SEQUENCE
  Engineered albumin binding polypeptide
LAQAKESANAELDAYGKSDFYKRLIDKAKTVEGVEALKDAILAAKP

SEQ ID NO: 1113 - protein, 46 aa, ARTIFICIAL SEQUENCE
  Engineered albumin binding polypeptide
LAQAKSAANAELDAYGCSDFYKRLIDKAKTVEGVEALKDAILAAKP

SEQ ID NO: 1114 - protein, 46 aa, ARTIFICIAL SEQUENCE
  Engineered albumin binding polypeptide
LAQAKSAANAELDAYGKSDFYKRLIDKAKTVEGVEALKDAILAACP

SEQ ID NO: 1115 - protein, 46 aa, ARTIFICIAL SEQUENCE
  Engineered albumin binding polypeptide
LAQAKSAANAELDAYGCSDFYKRLIDKAKTVEGVEALKDAILAACP

SEQ ID NO: 1116 - protein, 46 aa, ARTIFICIAL SEQUENCE
  Engineered albumin binding polypeptide
LAQAKSAANAELDAYGKSDFYKRLIDKAKTVEGVEALKDAILAAKP

SEQ ID NO: 1117 - protein, 46 aa, ARTIFICIAL SEQUENCE
  Engineered albumin binding polypeptide
LAQAKSAANSELDAYGCSDFYKRLIDKAKTVEGVEALKDAILAAKP

SEQ ID NO: 1118 - protein, 46 aa, ARTIFICIAL SEQUENCE
  Engineered albumin binding polypeptide
LAQAKSAANSELDAYGKSDFYKRLIDKAKTVEGVEALKDAILAACP

SEQ ID NO: 1119 - protein, 46 aa, ARTIFICIAL SEQUENCE
  Engineered albumin binding polypeptide
LAQAKSAANSELDAYGCSDFYKRLIDKAKTVEGVEALKDAILAACP

SEQ ID NO: 1120 - protein, 46 aa, ARTIFICIAL SEQUENCE
  Engineered albumin binding polypeptide
LAQAKSAANSELDAYGKSDFYKRLIDKAKTVEGVEALKDAILAAKP

SEQ ID NO: 1121 - protein, 46 aa, ARTIFICIAL SEQUENCE
  Engineered albumin binding polypeptide
LAQAKEAANAELDSYGCSDFYKRLIDKAKTVEGVEALKDAILAAKP

SEQ ID NO: 1122 - protein, 46 aa, ARTIFICIAL SEQUENCE
  Engineered albumin binding polypeptide
LAQAKEAANAELDSYGKSDFYKRLIDKAKTVEGVEALKDAILAACP

SEQ ID NO: 1123 - protein, 46 aa, ARTIFICIAL SEQUENCE
  Engineered albumin binding polypeptide
LAQAKEAANAELDSYGCSDFYKRLIDKAKTVEGVEALKDAILAACP

SEQ ID NO: 1124 - protein, 46 aa, ARTIFICIAL SEQUENCE
  Engineered albumin binding polypeptide
LAQAKEAANAELDSYGKSDFYKRLIDKAKTVEGVEALKDAILAAKP

SEQ ID NO: 1125 - protein, 46 aa, ARTIFICIAL SEQUENCE
  Engineered albumin binding polypeptide
LAQAKEAANSELDSYGCSDFYKRLIDKAKTVEGVEALKDAILAAKP

SEQ ID NO: 1126 - protein, 46 aa, ARTIFICIAL SEQUENCE
  Engineered albumin binding polypeptide
LAQAKEAANSELDSYGKSDFYKRLIDKAKTVEGVEALKDAILAACP

SEQ ID NO: 1127 - protein, 46 aa, ARTIFICIAL SEQUENCE
  Engineered albumin binding polypeptide
LAQAKEAANSELDSYGCSDFYKRLIDKAKTVEGVEALKDAILAACP

SEQ ID NO: 1128 - protein, 46 aa, ARTIFICIAL SEQUENCE
  Engineered albumin binding polypeptide
LAQAKEAANSELDSYGKSDFYKRLIDKAKTVEGVEALKDAILAAKP

SEQ ID NO: 1129 - protein, 46 aa, ARTIFICIAL SEQUENCE
  Engineered albumin binding polypeptide
LAQAKESANSELDSYGCSDFYKRLIDKAKTVEGVEALKDAILAAKP

SEQ ID NO: 1130 - protein, 46 aa, ARTIFICIAL SEQUENCE
  Engineered albumin binding polypeptide
LAQAKESANSELDSYGKSDFYKRLIDKAKTVEGVEALKDAILAACP

SEQ ID NO: 1131 - protein, 46 aa, ARTIFICIAL SEQUENCE
  Engineered albumin binding polypeptide
LAQAKESANSELDSYGCSDFYKRLIDKAKTVEGVEALKDAILAACP

SEQ ID NO: 1132 - protein, 46 aa, ARTIFICIAL SEQUENCE
  Engineered albumin binding polypeptide
LAQAKESANSELDSYGKSDFYKRLIDKAKTVEGVEALKDAILAAKP

SEQ ID NO: 1133 - protein, 46 aa, ARTIFICIAL SEQUENCE
  Engineered albumin binding polypeptide
LAQAKESANAELDSYGCSDFYKRLIDKAKTVEGVEALKDAILAAKP

SEQ ID NO: 1134 - protein, 46 aa, ARTIFICIAL SEQUENCE
  Engineered albumin binding polypeptide
LAQAKESANAELDSYGKSDFYKRLIDKAKTVEGVEALKDAILAACP

SEQ ID NO: 1135 - protein, 46 aa, ARTIFICIAL SEQUENCE
  Engineered albumin binding polypeptide
LAQAKESANAELDSYGCSDFYKRLIDKAKTVEGVEALKDAILAACP

SEQ ID NO: 1136 - protein, 46 aa, ARTIFICIAL SEQUENCE
  Engineered albumin binding polypeptide
LAQAKESANAELDSYGKSDFYKRLIDKAKTVEGVEALKDAILAAKP

SEQ ID NO: 1137 - protein, 46 aa, ARTIFICIAL SEQUENCE
  Engineered albumin binding polypeptide
LAQAKSAANAELDSYGCSDFYKRLIDKAKTVEGVEALKDAILAAKP

SEQ ID NO: 1138 - protein, 46 aa, ARTIFICIAL SEQUENCE
  Engineered albumin binding polypeptide
LAQAKSAANAELDSYGKSDFYKRLIDKAKTVEGVEALKDAILAACP

SEQ ID NO: 1139 - protein, 46 aa, ARTIFICIAL SEQUENCE
  Engineered albumin binding polypeptide
LAQAKSAANAELDSYGCSDFYKRLIDKAKTVEGVEALKDAILAACP

SEQ ID NO: 1140 - protein, 46 aa, ARTIFICIAL SEQUENCE
  Engineered albumin binding polypeptide
LAQAKSAANAELDSYGKSDFYKRLIDKAKTVEGVEALKDAILAAKP

SEQ ID NO: 1141 - protein, 46 aa, ARTIFICIAL SEQUENCE
  Engineered albumin binding polypeptide
LAQAKSAANSELDSYGCSDFYKRLIDKAKTVEGVEALKDAILAAKP

SEQ ID NO: 1142 - protein, 46 aa, ARTIFICIAL SEQUENCE
  Engineered albumin binding polypeptide
LAQAKSAANSELDSYGKSDFYKRLIDKAKTVEGVEALKDAILAACP

SEQ ID NO: 1143 - protein, 46 aa, ARTIFICIAL SEQUENCE
  Engineered albumin binding polypeptide
LAQAKSAANSELDSYGCSDFYKRLIDKAKTVEGVEALKDAILAACP

SEQ ID NO: 1144 - protein, 46 aa, ARTIFICIAL SEQUENCE
  Engineered albumin binding polypeptide
LAQAKSAANSELDSYGKSDFYKRLIDKAKTVEGVEALKDAILAAKP

SEQ ID NO: 1145 - protein, 46 aa, ARTIFICIAL SEQUENCE
  Engineered albumin binding polypeptide
LASAKEAANAELDCYGCSDFYKRLIDKAKTVEGVEALKDAILAAKP

SEQ ID NO: 1146 - protein, 46 aa, ARTIFICIAL SEQUENCE
  Engineered albumin binding polypeptide
LASAKEAANAELDCYGKSDFYKRLIDKAKTVEGVEALKDAILAACP

SEQ ID NO: 1147 - protein, 46 aa, ARTIFICIAL SEQUENCE
  Engineered albumin binding polypeptide
LASAKEAANAELDCYGCSDFYKRLIDKAKTVEGVEALKDAILAACP

SEQ ID NO: 1148 - protein, 46 aa, ARTIFICIAL SEQUENCE
  Engineered albumin binding polypeptide
LASAKEAANAELDCYGKSDFYKRLIDKAKTVEGVEALKDAILAAKP

SEQ ID NO: 1149 - protein, 46 aa, ARTIFICIAL SEQUENCE
  Engineered albumin binding polypeptide
LASAKEAANSELDCYGCSDFYKRLIDKAKTVEGVEALKDAILAAKP

SEQ ID NO: 1150 - protein, 46 aa, ARTIFICIAL SEQUENCE
  Engineered albumin binding polypeptide
LASAKEAANSELDCYGKSDFYKRLIDKAKTVEGVEALKDAILAACP

SEQ ID NO: 1151 - protein, 46 aa, ARTIFICIAL SEQUENCE
  Engineered albumin binding polypeptide
LASAKEAANSELDCYGCSDFYKRLIDKAKTVEGVEALKDAILAACP

SEQ ID NO: 1152 - protein, 46 aa, ARTIFICIAL SEQUENCE
  Engineered albumin binding polypeptide
LASAKEAANSELDCYGKSDFYKRLIDKAKTVEGVEALKDAILAAKP

SEQ ID NO: 1153 - protein, 46 aa, ARTIFICIAL SEQUENCE
  Engineered albumin binding polypeptide
LASAKESANSELDCYGCSDFYKRLIDKAKTVEGVEALKDAILAAKP

SEQ ID NO: 1154 - protein, 46 aa, ARTIFICIAL SEQUENCE
  Engineered albumin binding polypeptide
LASAKESANSELDCYGKSDFYKRLIDKAKTVEGVEALKDAILAACP

SEQ ID NO: 1155 - protein, 46 aa, ARTIFICIAL SEQUENCE
  Engineered albumin binding polypeptide
LASAKESANSELDCYGCSDFYKRLIDKAKTVEGVEALKDAILAACP

SEQ ID NO: 1156 - protein, 46 aa, ARTIFICIAL SEQUENCE
  Engineered albumin binding polypeptide
LASAKESANSELDCYGKSDFYKRLIDKAKTVEGVEALKDAILAAKP

SEQ ID NO: 1157 - protein, 46 aa, ARTIFICIAL SEQUENCE
  Engineered albumin binding polypeptide
LASAKESANAELDCYGCSDFYKRLIDKAKTVEGVEALKDAILAAKP

SEQ ID NO: 1158 - protein, 46 aa, ARTIFICIAL SEQUENCE
  Engineered albumin binding polypeptide
LASAKESANAELDCYGKSDFYKRLIDKAKTVEGVEALKDAILAACP

SEQ ID NO: 1159 - protein, 46 aa, ARTIFICIAL SEQUENCE
  Engineered albumin binding polypeptide
LASAKESANAELDCYGCSDFYKRLIDKAKTVEGVEALKDAILAACP

SEQ ID NO: 1160 - protein, 46 aa, ARTIFICIAL SEQUENCE
  Engineered albumin binding polypeptide
LASAKESANAELDCYGKSDFYKRLIDKAKTVEGVEALKDAILAAKP

SEQ ID NO: 1161 - protein, 46 aa, ARTIFICIAL SEQUENCE
  Engineered albumin binding polypeptide
LASAKSAANAELDCYGCSDFYKRLIDKAKTVEGVEALKDAILAAKP

SEQ ID NO: 1162 - protein, 46 aa, ARTIFICIAL SEQUENCE
  Engineered albumin binding polypeptide
LASAKSAANAELDCYGKSDFYKRLIDKAKTVEGVEALKDAILAACP

SEQ ID NO: 1163 - protein, 46 aa, ARTIFICIAL SEQUENCE
  Engineered albumin binding polypeptide
LASAKSAANAELDCYGCSDFYKRLIDKAKTVEGVEALKDAILAACP

SEQ ID NO: 1164 - protein, 46 aa, ARTIFICIAL SEQUENCE
  Engineered albumin binding polypeptide
LASAKSAANAELDCYGKSDFYKRLIDKAKTVEGVEALKDAILAAKP

SEQ ID NO: 1165 - protein, 46 aa, ARTIFICIAL SEQUENCE
  Engineered albumin binding polypeptide
LASAKSAANSELDCYGCSDFYKRLIDKAKTVEGVEALKDAILAAKP

SEQ ID NO: 1166 - protein, 46 aa, ARTIFICIAL SEQUENCE
  Engineered albumin binding polypeptide
LASAKSAANSELDCYGKSDFYKRLIDKAKTVEGVEALKDAILAACP

SEQ ID NO: 1167 - protein, 46 aa, ARTIFICIAL SEQUENCE
  Engineered albumin binding polypeptide
LASAKSAANSELDCYGCSDFYKRLIDKAKTVEGVEALKDAILAACP

SEQ ID NO: 1168 - protein, 46 aa, ARTIFICIAL SEQUENCE
  Engineered albumin binding polypeptide
LASAKSAANSELDCYGKSDFYKRLIDKAKTVEGVEALKDAILAAKP

SEQ ID NO: 1169 - protein, 46 aa, ARTIFICIAL SEQUENCE
  Engineered albumin binding polypeptide
LASAKEAANAELDKYGCSDFYKRLIDKAKTVEGVEALKDAILAAKP

SEQ ID NO: 1170 - protein, 46 aa, ARTIFICIAL SEQUENCE
  Engineered albumin binding polypeptide
LASAKEAANAELDKYGKSDFYKRLIDKAKTVEGVEALKDAILAACP

SEQ ID NO: 1171 - protein, 46 aa, ARTIFICIAL SEQUENCE
  Engineered albumin binding polypeptide
LASAKEAANAELDKYGCSDFYKRLIDKAKTVEGVEALKDAILAACP

SEQ ID NO: 1172 - protein, 46 aa, ARTIFICIAL SEQUENCE
  Engineered albumin binding polypeptide
LASAKEAANAELDKYGKSDFYKRLIDKAKTVEGVEALKDAILAAKP

SEQ ID NO: 1173 - protein, 46 aa, ARTIFICIAL SEQUENCE
  Engineered albumin binding polypeptide
LASAKEAANSELDKYGCSDFYKRLIDKAKTVEGVEALKDAILAAKP

SEQ ID NO: 1174 - protein, 46 aa, ARTIFICIAL SEQUENCE
  Engineered albumin binding polypeptide
LASAKEAANSELDKYGKSDFYKRLIDKAKTVEGVEALKDAILAACP

SEQ ID NO: 1175 - protein, 46 aa, ARTIFICIAL SEQUENCE
  Engineered albumin binding polypeptide
LASAKEAANSELDKYGCSDFYKRLIDKAKTVEGVEALKDAILAACP

SEQ ID NO: 1176 - protein, 46 aa, ARTIFICIAL SEQUENCE
  Engineered albumin binding polypeptide
LASAKEAANSELDKYGKSDFYKRLIDKAKTVEGVEALKDAILAAKP

SEQ ID NO: 1177 - protein, 46 aa, ARTIFICIAL SEQUENCE
  Engineered albumin binding polypeptide
LASAKESANSELDKYGCSDFYKRLIDKAKTVEGVEALKDAILAAKP

SEQ ID NO: 1178 - protein, 46 aa, ARTIFICIAL SEQUENCE
  Engineered albumin binding polypeptide
LASAKESANSELDKYGKSDFYKRLIDKAKTVEGVEALKDAILAACP

SEQ ID NO: 1179 - protein, 46 aa, ARTIFICIAL SEQUENCE
  Engineered albumin binding polypeptide
LASAKESANSELDKYGCSDFYKRLIDKAKTVEGVEALKDAILAACP

SEQ ID NO: 1180 - protein, 46 aa, ARTIFICIAL SEQUENCE
  Engineered albumin binding polypeptide
LASAKESANSELDKYGKSDFYKRLIDKAKTVEGVEALKDAILAAKP

SEQ ID NO: 1181 - protein, 46 aa, ARTIFICIAL SEQUENCE
  Engineered albumin binding polypeptide
LASAKESANAELDKYGCSDFYKRLIDKAKTVEGVEALKDAILAAKP

SEQ ID NO: 1182 - protein, 46 aa, ARTIFICIAL SEQUENCE
  Engineered albumin binding polypeptide
LASAKESANAELDKYGKSDFYKRLIDKAKTVEGVEALKDAILAACP

SEQ ID NO: 1183 - protein, 46 aa, ARTIFICIAL SEQUENCE
  Engineered albumin binding polypeptide
LASAKESANAELDKYGCSDFYKRLIDKAKTVEGVEALKDAILAACP

SEQ ID NO: 1184 - protein, 46 aa, ARTIFICIAL SEQUENCE
  Engineered albumin binding polypeptide
LASAKESANAELDKYGKSDFYKRLIDKAKTVEGVEALKDAILAAKP

SEQ ID NO: 1185 - protein, 46 aa, ARTIFICIAL SEQUENCE
  Engineered albumin binding polypeptide
LASAKSAANAELDKYGCSDFYKRLIDKAKTVEGVEALKDAILAAKP

SEQ ID NO: 1186 - protein, 46 aa, ARTIFICIAL SEQUENCE
  Engineered albumin binding polypeptide
LASAKSAANAELDKYGKSDFYKRLIDKAKTVEGVEALKDAILAACP

SEQ ID NO: 1187 - protein, 46 aa, ARTIFICIAL SEQUENCE
  Engineered albumin binding polypeptide
LASAKSAANAELDKYGCSDFYKRLIDKAKTVEGVEALKDAILAACP

SEQ ID NO: 1188 - protein, 46 aa, ARTIFICIAL SEQUENCE
  Engineered albumin binding polypeptide
LASAKSAANAELDKYGKSDFYKRLIDKAKTVEGVEALKDAILAAKP

SEQ ID NO: 1189 - protein, 46 aa, ARTIFICIAL SEQUENCE
  Engineered albumin binding polypeptide
LASAKSAANSELDKYGCSDFYKRLIDKAKTVEGVEALKDAILAAKP

SEQ ID NO: 1190 - protein, 46 aa, ARTIFICIAL SEQUENCE
  Engineered albumin binding polypeptide
LASAKSAANSELDKYGKSDFYKRLIDKAKTVEGVEALKDAILAACP

SEQ ID NO: 1191 - protein, 46 aa, ARTIFICIAL SEQUENCE
  Engineered albumin binding polypeptide
LASAKSAANSELDKYGCSDFYKRLIDKAKTVEGVEALKDAILAACP

SEQ ID NO: 1192 - protein, 46 aa, ARTIFICIAL SEQUENCE
  Engineered albumin binding polypeptide
LASAKSAANSELDKYGKSDFYKRLIDKAKTVEGVEALKDAILAAKP

SEQ ID NO: 1193 - protein, 46 aa, ARTIFICIAL SEQUENCE
  Engineered albumin binding polypeptide
LAEAKEAANAELDCYGCSDFYKRLIDKAKTVEGVEALKDAILAAKP

SEQ ID NO: 1194 - protein, 46 aa, ARTIFICIAL SEQUENCE
  Engineered albumin binding polypeptide
LAEAKEAANAELDCYGKSDFYKRLIDKAKTVEGVEALKDAILAACP

SEQ ID NO: 1195 - protein, 46 aa, ARTIFICIAL SEQUENCE
  Engineered albumin binding polypeptide
LAEAKEAANAELDCYGCSDFYKRLIDKAKTVEGVEALKDAILAACP

SEQ ID NO: 1196 - protein, 46 aa, ARTIFICIAL SEQUENCE
  Engineered albumin binding polypeptide
LAEAKEAANAELDCYGKSDFYKRLIDKAKTVEGVEALKDAILAAKP

SEQ ID NO: 1197 - protein, 46 aa, ARTIFICIAL SEQUENCE
  Engineered albumin binding polypeptide
LAEAKEAANSELDCYGCSDFYKRLIDKAKTVEGVEALKDAILAAKP

SEQ ID NO: 1198 - protein, 46 aa, ARTIFICIAL SEQUENCE
  Engineered albumin binding polypeptide
LAEAKEAANSELDCYGKSDFYKRLIDKAKTVEGVEALKDAILAACP

SEQ ID NO: 1199 - protein, 46 aa, ARTIFICIAL SEQUENCE
  Engineered albumin binding polypeptide
LAEAKEAANSELDCYGCSDFYKRLIDKAKTVEGVEALKDAILAACP

SEQ ID NO: 1200 - protein, 46 aa, ARTIFICIAL SEQUENCE
  Engineered albumin binding polypeptide
LAEAKEAANSELDCYGKSDFYKRLIDKAKTVEGVEALKDAILAAKP

SEQ ID NO: 1201 - protein, 46 aa, ARTIFICIAL SEQUENCE
  Engineered albumin binding polypeptide
LAEAKESANSELDCYGCSDFYKRLIDKAKTVEGVEALKDAILAAKP

SEQ ID NO: 1202 - protein, 46 aa, ARTIFICIAL SEQUENCE
  Engineered albumin binding polypeptide
LAEAKESANSELDCYGKSDFYKRLIDKAKTVEGVEALKDAILAACP

SEQ ID NO: 1203 - protein, 46 aa, ARTIFICIAL SEQUENCE
  Engineered albumin binding polypeptide
LAEAKESANSELDCYGCSDFYKRLIDKAKTVEGVEALKDAILAACP

SEQ ID NO: 1204 - protein, 46 aa, ARTIFICIAL SEQUENCE
  Engineered albumin binding polypeptide
LAEAKESANSELDCYGKSDFYKRLIDKAKTVEGVEALKDAILAAKP

SEQ ID NO: 1205 - protein, 46 aa, ARTIFICIAL SEQUENCE
  Engineered albumin binding polypeptide
LAEAKESANAELDCYGCSDFYKRLIDKAKTVEGVEALKDAILAAKP

SEQ ID NO: 1206 - protein, 46 aa, ARTIFICIAL SEQUENCE
  Engineered albumin binding polypeptide
LAEAKESANAELDCYGKSDFYKRLIDKAKTVEGVEALKDAILAACP

SEQ ID NO: 1207 - protein, 46 aa, ARTIFICIAL SEQUENCE
  Engineered albumin binding polypeptide
LAEAKESANAELDCYGCSDFYKRLIDKAKTVEGVEALKDAILAACP

SEQ ID NO: 1208 - protein, 46 aa, ARTIFICIAL SEQUENCE
  Engineered albumin binding polypeptide
LAEAKESANAELDCYGKSDFYKRLIDKAKTVEGVEALKDAILAAKP

SEQ ID NO: 1209 - protein, 46 aa, ARTIFICIAL SEQUENCE
  Engineered albumin binding polypeptide
LAEAKSAANAELDCYGCSDFYKRLIDKAKTVEGVEALKDAILAAKP

SEQ ID NO: 1210 - protein, 46 aa, ARTIFICIAL SEQUENCE
  Engineered albumin binding polypeptide
LAEAKSAANAELDCYGKSDFYKRLIDKAKTVEGVEALKDAILAACP

SEQ ID NO: 1211 - protein, 46 aa, ARTIFICIAL SEQUENCE
  Engineered albumin binding polypeptide
LAEAKSAANAELDCYGCSDFYKRLIDKAKTVEGVEALKDAILAACP

SEQ ID NO: 1212 - protein, 46 aa, ARTIFICIAL SEQUENCE
  Engineered albumin binding polypeptide
LAEAKSAANAELDCYGKSDFYKRLIDKAKTVEGVEALKDAILAAKP

SEQ ID NO: 1213 - protein, 46 aa, ARTIFICIAL SEQUENCE
  Engineered albumin binding polypeptide
LAEAKSAANSELDCYGCSDFYKRLIDKAKTVEGVEALKDAILAAKP

SEQ ID NO: 1214 - protein, 46 aa, ARTIFICIAL SEQUENCE
  Engineered albumin binding polypeptide
LAEAKSAANSELDCYGKSDFYKRLIDKAKTVEGVEALKDAILAACP

SEQ ID NO: 1215 - protein, 46 aa, ARTIFICIAL SEQUENCE
  Engineered albumin binding polypeptide
LAEAKSAANSELDCYGCSDFYKRLIDKAKTVEGVEALKDAILAACP

SEQ ID NO: 1216 - protein, 46 aa, ARTIFICIAL SEQUENCE
  Engineered albumin binding polypeptide
LAEAKSAANSELDCYGKSDFYKRLIDKAKTVEGVEALKDAILAAKP

SEQ ID NO: 1217 - protein, 46 aa, ARTIFICIAL SEQUENCE
  Engineered albumin binding polypeptide
LAEAKEAANAELDKYGCSDFYKRLIDKAKTVEGVEALKDAILAAKP

SEQ ID NO: 1218 - protein, 46 aa, ARTIFICIAL SEQUENCE
  Engineered albumin binding polypeptide
LAEAKEAANAELDKYGKSDFYKRLIDKAKTVEGVEALKDAILAACP

SEQ ID NO: 1219 - protein, 46 aa, ARTIFICIAL SEQUENCE
  Engineered albumin binding polypeptide
LAEAKEAANAELDKYGCSDFYKRLIDKAKTVEGVEALKDAILAACP

SEQ ID NO: 1220 - protein, 46 aa, ARTIFICIAL SEQUENCE
  Engineered albumin binding polypeptide
LAEAKEAANAELDKYGKSDFYKRLIDKAKTVEGVEALKDAILAAKP

SEQ ID NO: 1221 - protein, 46 aa, ARTIFICIAL SEQUENCE
  Engineered albumin binding polypeptide
LAEAKEAANSELDKYGCSDFYKRLIDKAKTVEGVEALKDAILAAKP

SEQ ID NO: 1222 - protein, 46 aa, ARTIFICIAL SEQUENCE
  Engineered albumin binding polypeptide
LAEAKEAANSELDKYGKSDFYKRLIDKAKTVEGVEALKDAILAACP

SEQ ID NO: 1223 - protein, 46 aa, ARTIFICIAL SEQUENCE
  Engineered albumin binding polypeptide
LAEAKEAANSELDKYGCSDFYKRLIDKAKTVEGVEALKDAILAACP

SEQ ID NO: 1224 - protein, 46 aa, ARTIFICIAL SEQUENCE
  Engineered albumin binding polypeptide
LAEAKEAANSELDKYGKSDFYKRLIDKAKTVEGVEALKDAILAAKP

SEQ ID NO: 1225 - protein, 46 aa, ARTIFICIAL SEQUENCE
  Engineered albumin binding polypeptide
LAEAKESANSELDKYGCSDFYKRLIDKAKTVEGVEALKDAILAAKP

SEQ ID NO: 1226 - protein, 46 aa, ARTIFICIAL SEQUENCE
  Engineered albumin binding polypeptide
LAEAKESANSELDKYGKSDFYKRLIDKAKTVEGVEALKDAILAACP

SEQ ID NO: 1227 - protein, 46 aa, ARTIFICIAL SEQUENCE
  Engineered albumin binding polypeptide
LAEAKESANSELDKYGCSDFYKRLIDKAKTVEGVEALKDAILAACP

SEQ ID NO: 1228 - protein, 46 aa, ARTIFICIAL SEQUENCE
  Engineered albumin binding polypeptide
LAEAKESANSELDKYGKSDFYKRLIDKAKTVEGVEALKDAILAAKP

SEQ ID NO: 1229 - protein, 46 aa, ARTIFICIAL SEQUENCE
  Engineered albumin binding polypeptide
LAEAKESANAELDKYGCSDFYKRLIDKAKTVEGVEALKDAILAAKP

SEQ ID NO: 1230 - protein, 46 aa, ARTIFICIAL SEQUENCE
  Engineered albumin binding polypeptide
LAEAKESANAELDKYGKSDFYKRLIDKAKTVEGVEALKDAILAACP

SEQ ID NO: 1231 - protein, 46 aa, ARTIFICIAL SEQUENCE
  Engineered albumin binding polypeptide
LAEAKESANAELDKYGCSDFYKRLIDKAKTVEGVEALKDAILAACP

SEQ ID NO: 1232 - protein, 46 aa, ARTIFICIAL SEQUENCE
  Engineered albumin binding polypeptide
LAEAKESANAELDKYGKSDFYKRLIDKAKTVEGVEALKDAILAAKP

SEQ ID NO: 1233 - protein, 46 aa, ARTIFICIAL SEQUENCE
  Engineered albumin binding polypeptide
LAEAKSAANAELDKYGCSDFYKRLIDKAKTVEGVEALKDAILAAKP

SEQ ID NO: 1234 - protein, 46 aa, ARTIFICIAL SEQUENCE
  Engineered albumin binding polypeptide
LAEAKSAANAELDKYGKSDFYKRLIDKAKTVEGVEALKDAILAACP

SEQ ID NO: 1235 - protein, 46 aa, ARTIFICIAL SEQUENCE
  Engineered albumin binding polypeptide
LAEAKSAANAELDKYGCSDFYKRLIDKAKTVEGVEALKDAILAACP

SEQ ID NO: 1236 - protein, 46 aa, ARTIFICIAL SEQUENCE
  Engineered albumin binding polypeptide
LAEAKSAANAELDKYGKSDFYKRLIDKAKTVEGVEALKDAILAAKP

SEQ ID NO: 1237 - protein, 46 aa, ARTIFICIAL SEQUENCE
  Engineered albumin binding polypeptide
LAEAKSAANSELDKYGCSDFYKRLIDKAKTVEGVEALKDAILAAKP

SEQ ID NO: 1238 - protein, 46 aa, ARTIFICIAL SEQUENCE
  Engineered albumin binding polypeptide
LAEAKSAANSELDKYGKSDFYKRLIDKAKTVEGVEALKDAILAACP

SEQ ID NO: 1239 - protein, 46 aa, ARTIFICIAL SEQUENCE
  Engineered albumin binding polypeptide
LAEAKSAANSELDKYGCSDFYKRLIDKAKTVEGVEALKDAILAACP

SEQ ID NO: 1240 - protein, 46 aa, ARTIFICIAL SEQUENCE
  Engineered albumin binding polypeptide
LAEAKSAANSELDKYGKSDFYKRLIDKAKTVEGVEALKDAILAAKP

SEQ ID NO: 1241 - protein, 46 aa, ARTIFICIAL SEQUENCE
  Engineered albumin binding polypeptide
LAQAKEAANAELDCYGCSDFYKRLIDKAKTVEGVEALKDAILAAKP

SEQ ID NO: 1242 - protein, 46 aa, ARTIFICIAL SEQUENCE
  Engineered albumin binding polypeptide
LAQAKEAANAELDCYGKSDFYKRLIDKAKTVEGVEALKDAILAACP

SEQ ID NO: 1243 - protein, 46 aa, ARTIFICIAL SEQUENCE
  Engineered albumin binding polypeptide
LAQAKEAANAELDCYGCSDFYKRLIDKAKTVEGVEALKDAILAACP

SEQ ID NO: 1244 - protein, 46 aa, ARTIFICIAL SEQUENCE
  Engineered albumin binding polypeptide
LAQAKEAANAELDCYGKSDFYKRLIDKAKTVEGVEALKDAILAAKP

SEQ ID NO: 1245 - protein, 46 aa, ARTIFICIAL SEQUENCE
  Engineered albumin binding polypeptide
LAQAKEAANSELDCYGCSDFYKRLIDKAKTVEGVEALKDAILAAKP

SEQ ID NO: 1246 - protein, 46 aa, ARTIFICIAL SEQUENCE
  Engineered albumin binding polypeptide
LAQAKEAANSELDCYGKSDFYKRLIDKAKTVEGVEALKDAILAACP

SEQ ID NO: 1247 - protein, 46 aa, ARTIFICIAL SEQUENCE
  Engineered albumin binding polypeptide
LAQAKEAANSELDCYGCSDFYKRLIDKAKTVEGVEALKDAILAACP

SEQ ID NO: 1248 - protein, 46 aa, ARTIFICIAL SEQUENCE
  Engineered albumin binding polypeptide
LAQAKEAANSELDCYGKSDFYKRLIDKAKTVEGVEALKDAILAAKP

SEQ ID NO: 1249 - protein, 46 aa, ARTIFICIAL SEQUENCE
  Engineered albumin binding polypeptide
LAQAKESANSELDCYGCSDFYKRLIDKAKTVEGVEALKDAILAAKP

SEQ ID NO: 1250 - protein, 46 aa, ARTIFICIAL SEQUENCE
  Engineered albumin binding polypeptide
LAQAKESANSELDCYGKSDFYKRLIDKAKTVEGVEALKDAILAACP

SEQ ID NO: 1251 - protein, 46 aa, ARTIFICIAL SEQUENCE
  Engineered albumin binding polypeptide
LAQAKESANSELDCYGCSDFYKRLIDKAKTVEGVEALKDAILAACP

SEQ ID NO: 1252 - protein, 46 aa, ARTIFICIAL SEQUENCE
  Engineered albumin binding polypeptide
LAQAKESANSELDCYGKSDFYKRLIDKAKTVEGVEALKDAILAAKP

SEQ ID NO: 1253 - protein, 46 aa, ARTIFICIAL SEQUENCE
  Engineered albumin binding polypeptide
LAQAKESANAELDCYGCSDFYKRLIDKAKTVEGVEALKDAILAAKP

SEQ ID NO: 1254 - protein, 46 aa, ARTIFICIAL SEQUENCE
  Engineered albumin binding polypeptide
LAQAKESANAELDCYGKSDFYKRLIDKAKTVEGVEALKDAILAACP

SEQ ID NO: 1255 - protein, 46 aa, ARTIFICIAL SEQUENCE
  Engineered albumin binding polypeptide
LAQAKESANAELDCYGCSDFYKRLIDKAKTVEGVEALKDAILAACP

SEQ ID NO: 1256 - protein, 46 aa, ARTIFICIAL SEQUENCE
  Engineered albumin binding polypeptide
LAQAKESANAELDCYGKSDFYKRLIDKAKTVEGVEALKDAILAAKP

SEQ ID NO: 1257 - protein, 46 aa, ARTIFICIAL SEQUENCE
  Engineered albumin binding polypeptide
LAQAKSAANAELDCYGCSDFYKRLIDKAKTVEGVEALKDAILAAKP

SEQ ID NO: 1258 - protein, 46 aa, ARTIFICIAL SEQUENCE
  Engineered albumin binding polypeptide
LAQAKSAANAELDCYGKSDFYKRLIDKAKTVEGVEALKDAILAACP

SEQ ID NO: 1259 - protein, 46 aa, ARTIFICIAL SEQUENCE
  Engineered albumin binding polypeptide
LAQAKSAANAELDCYGCSDFYKRLIDKAKTVEGVEALKDAILAACP

SEQ ID NO: 1260 - protein, 46 aa, ARTIFICIAL SEQUENCE
  Engineered albumin binding polypeptide
LAQAKSAANAELDCYGKSDFYKRLIDKAKTVEGVEALKDAILAAKP

SEQ ID NO: 1261 - protein, 46 aa, ARTIFICIAL SEQUENCE
  Engineered albumin binding polypeptide
LAQAKSAANSELDCYGCSDFYKRLIDKAKTVEGVEALKDAILAAKP

SEQ ID NO: 1262 - protein, 46 aa, ARTIFICIAL SEQUENCE
  Engineered albumin binding polypeptide
LAQAKSAANSELDCYGKSDFYKRLIDKAKTVEGVEALKDAILAACP

SEQ ID NO: 1263 - protein, 46 aa, ARTIFICIAL SEQUENCE
  Engineered albumin binding polypeptide
LAQAKSAANSELDCYGCSDFYKRLIDKAKTVEGVEALKDAILAACP

SEQ ID NO: 1264 - protein, 46 aa, ARTIFICIAL SEQUENCE
  Engineered albumin binding polypeptide
LAQAKSAANSELDCYGKSDFYKRLIDKAKTVEGVEALKDAILAAKP

SEQ ID NO: 1265 - protein, 46 aa, ARTIFICIAL SEQUENCE
  Engineered albumin binding polypeptide
LAQAKEAANAELDKYGCSDFYKRLIDKAKTVEGVEALKDAILAAKP

SEQ ID NO: 1266 - protein, 46 aa, ARTIFICIAL SEQUENCE
  Engineered albumin binding polypeptide
LAQAKEAANAELDKYGKSDFYKRLIDKAKTVEGVEALKDAILAACP

SEQ ID NO: 1267 - protein, 46 aa, ARTIFICIAL SEQUENCE
  Engineered albumin binding polypeptide
LAQAKEAANAELDKYGCSDFYKRLIDKAKTVEGVEALKDAILAACP

SEQ ID NO: 1268 - protein, 46 aa, ARTIFICIAL SEQUENCE
  Engineered albumin binding polypeptide
LAQAKEAANAELDKYGKSDFYKRLIDKAKTVEGVEALKDAILAAKP

SEQ ID NO: 1269 - protein, 46 aa, ARTIFICIAL SEQUENCE
  Engineered albumin binding polypeptide
LAQAKEAANSELDKYGCSDFYKRLIDKAKTVEGVEALKDAILAAKP

SEQ ID NO: 1270 - protein, 46 aa, ARTIFICIAL SEQUENCE
  Engineered albumin binding polypeptide
LAQAKEAANSELDKYGKSDFYKRLIDKAKTVEGVEALKDAILAACP

SEQ ID NO: 1271 - protein, 46 aa, ARTIFICIAL SEQUENCE
  Engineered albumin binding polypeptide
LAQAKEAANSELDKYGCSDFYKRLIDKAKTVEGVEALKDAILAACP

SEQ ID NO: 1272 - protein, 46 aa, ARTIFICIAL SEQUENCE
  Engineered albumin binding polypeptide
LAQAKEAANSELDKYGKSDFYKRLIDKAKTVEGVEALKDAILAAKP

SEQ ID NO: 1273 - protein, 46 aa, ARTIFICIAL SEQUENCE
  Engineered albumin binding polypeptide
LAQAKESANSELDKYGCSDFYKRLIDKAKTVEGVEALKDAILAAKP

SEQ ID NO: 1274 - protein, 46 aa, ARTIFICIAL SEQUENCE
  Engineered albumin binding polypeptide
LAQAKESANSELDKYGKSDFYKRLIDKAKTVEGVEALKDAILAACP

SEQ ID NO: 1275 - protein, 46 aa, ARTIFICIAL SEQUENCE
  Engineered albumin binding polypeptide
LAQAKESANSELDKYGCSDFYKRLIDKAKTVEGVEALKDAILAACP

SEQ ID NO: 1276 - protein, 46 aa, ARTIFICIAL SEQUENCE
  Engineered albumin binding polypeptide
LAQAKESANSELDKYGKSDFYKRLIDKAKTVEGVEALKDAILAAKP

SEQ ID NO: 1277 - protein, 46 aa, ARTIFICIAL SEQUENCE
  Engineered albumin binding polypeptide
LAQAKESANAELDKYGCSDFYKRLIDKAKTVEGVEALKDAILAAKP

SEQ ID NO: 1278 - protein, 46 aa, ARTIFICIAL SEQUENCE
  Engineered albumin binding polypeptide
LAQAKESANAELDKYGKSDFYKRLIDKAKTVEGVEALKDAILAACP

SEQ ID NO: 1279 - protein, 46 aa, ARTIFICIAL SEQUENCE
  Engineered albumin binding polypeptide
LAQAKESANAELDKYGCSDFYKRLIDKAKTVEGVEALKDAILAACP

SEQ ID NO: 1280 - protein, 46 aa, ARTIFICIAL SEQUENCE
  Engineered albumin binding polypeptide
LAQAKESANAELDKYGKSDFYKRLIDKAKTVEGVEALKDAILAAKP

SEQ ID NO: 1281 - protein, 46 aa, ARTIFICIAL SEQUENCE
  Engineered albumin binding polypeptide
LAQAKSAANAELDKYGCSDFYKRLIDKAKTVEGVEALKDAILAAKP

SEQ ID NO: 1282 - protein, 46 aa, ARTIFICIAL SEQUENCE
  Engineered albumin binding polypeptide
LAQAKSAANAELDKYGKSDFYKRLIDKAKTVEGVEALKDAILAACP

SEQ ID NO: 1283 - protein, 46 aa, ARTIFICIAL SEQUENCE
  Engineered albumin binding polypeptide
LAQAKSAANAELDKYGCSDFYKRLIDKAKTVEGVEALKDAILAACP

SEQ ID NO: 1284 - protein, 46 aa, ARTIFICIAL SEQUENCE
  Engineered albumin binding polypeptide
LAQAKSAANAELDKYGKSDFYKRLIDKAKTVEGVEALKDAILAAKP

SEQ ID NO: 1285 - protein, 46 aa, ARTIFICIAL SEQUENCE
  Engineered albumin binding polypeptide
LAQAKSAANSELDKYGCSDFYKRLIDKAKTVEGVEALKDAILAAKP

SEQ ID NO: 1286 - protein, 46 aa, ARTIFICIAL SEQUENCE
  Engineered albumin binding polypeptide
LAQAKSAANSELDKYGKSDFYKRLIDKAKTVEGVEALKDAILAACP

SEQ ID NO: 1287 - protein, 46 aa, ARTIFICIAL SEQUENCE
  Engineered albumin binding polypeptide
LAQAKSAANSELDKYGCSDFYKRLIDKAKTVEGVEALKDAILAACP

SEQ ID NO: 1288 - protein, 46 aa, ARTIFICIAL SEQUENCE
  Engineered albumin binding polypeptide
LAQAKSAANSELDKYGKSDFYKRLIDKAKTVEGVEALKDAILAAKP

SEQ ID NO: 1289 - protein, 46 aa, ARTIFICIAL SEQUENCE
  Engineered albumin binding polypeptide
LACAKEAANAELDCYGCSDFYKRLIDKAKTVEGVEALKDAILAAKP

SEQ ID NO: 1290 - protein, 46 aa, ARTIFICIAL SEQUENCE
  Engineered albumin binding polypeptide
LACAKEAANAELDCYGKSDFYKRLIDKAKTVEGVEALKDAILAACP

SEQ ID NO: 1291 - protein, 46 aa, ARTIFICIAL SEQUENCE
  Engineered albumin binding polypeptide
LACAKEAANAELDCYGCSDFYKRLIDKAKTVEGVEALKDAILAACP

SEQ ID NO: 1292 - protein, 46 aa, ARTIFICIAL SEQUENCE
  Engineered albumin binding polypeptide
LACAKEAANAELDCYGKSDFYKRLIDKAKTVEGVEALKDAILAAKP

SEQ ID NO: 1293 - protein, 46 aa, ARTIFICIAL SEQUENCE
  Engineered albumin binding polypeptide
LACAKEAANSELDCYGCSDFYKRLIDKAKTVEGVEALKDAILAAKP

SEQ ID NO: 1294 - protein, 46 aa, ARTIFICIAL SEQUENCE
  Engineered albumin binding polypeptide
LACAKEAANSELDCYGKSDFYKRLIDKAKTVEGVEALKDAILAACP

SEQ ID NO: 1295 - protein, 46 aa, ARTIFICIAL SEQUENCE
  Engineered albumin binding polypeptide
LACAKEAANSELDCYGCSDFYKRLIDKAKTVEGVEALKDAILAACP

SEQ ID NO: 1296 - protein, 46 aa, ARTIFICIAL SEQUENCE
  Engineered albumin binding polypeptide
LACAKEAANSELDCYGKSDFYKRLIDKAKTVEGVEALKDAILAAKP

SEQ ID NO: 1297 - protein, 46 aa, ARTIFICIAL SEQUENCE
  Engineered albumin binding polypeptide
LACAKESANSELDCYGCSDFYKRLIDKAKTVEGVEALKDAILAAKP

SEQ ID NO: 1298 - protein, 46 aa, ARTIFICIAL SEQUENCE
  Engineered albumin binding polypeptide
LACAKESANSELDCYGKSDFYKRLIDKAKTVEGVEALKDAILAACP

SEQ ID NO: 1299 - protein, 46 aa, ARTIFICIAL SEQUENCE
  Engineered albumin binding polypeptide
LACAKESANSELDCYGCSDFYKRLIDKAKTVEGVEALKDAILAACP

SEQ ID NO: 1300 - protein, 46 aa, ARTIFICIAL SEQUENCE
  Engineered albumin binding polypeptide
LACAKESANSELDCYGKSDFYKRLIDKAKTVEGVEALKDAILAAKP

SEQ ID NO: 1301 - protein, 46 aa, ARTIFICIAL SEQUENCE
  Engineered albumin binding polypeptide
LACAKESANAELDCYGCSDFYKRLIDKAKTVEGVEALKDAILAAKP

SEQ ID NO: 1302 - protein, 46 aa, ARTIFICIAL SEQUENCE
  Engineered albumin binding polypeptide
LACAKESANAELDCYGKSDFYKRLIDKAKTVEGVEALKDAILAACP

SEQ ID NO: 1303 - protein, 46 aa, ARTIFICIAL SEQUENCE
  Engineered albumin binding polypeptide
LACAKESANAELDCYGCSDFYKRLIDKAKTVEGVEALKDAILAACP

SEQ ID NO: 1304 - protein, 46 aa, ARTIFICIAL SEQUENCE
  Engineered albumin binding polypeptide
LACAKESANAELDCYGKSDFYKRLIDKAKTVEGVEALKDAILAAKP

SEQ ID NO: 1305 - protein, 46 aa, ARTIFICIAL SEQUENCE
  Engineered albumin binding polypeptide
LACAKSAANAELDCYGCSDFYKRLIDKAKTVEGVEALKDAILAAKP

SEQ ID NO: 1306 - protein, 46 aa, ARTIFICIAL SEQUENCE
  Engineered albumin binding polypeptide
LACAKSAANAELDCYGKSDFYKRLIDKAKTVEGVEALKDAILAACP

SEQ ID NO: 1307 - protein, 46 aa, ARTIFICIAL SEQUENCE
  Engineered albumin binding polypeptide
LACAKSAANAELDCYGCSDFYKRLIDKAKTVEGVEALKDAILAACP

SEQ ID NO: 1308 - protein, 46 aa, ARTIFICIAL SEQUENCE
  Engineered albumin binding polypeptide
LACAKSAANAELDCYGKSDFYKRLIDKAKTVEGVEALKDAILAAKP

SEQ ID NO: 1309 - protein, 46 aa, ARTIFICIAL SEQUENCE
  Engineered albumin binding polypeptide
LACAKSAANSELDCYGCSDFYKRLIDKAKTVEGVEALKDAILAAKP

SEQ ID NO: 1310 - protein, 46 aa, ARTIFICIAL SEQUENCE
  Engineered albumin binding polypeptide
LACAKSAANSELDCYGKSDFYKRLIDKAKTVEGVEALKDAILAACP

SEQ ID NO: 1311 - protein, 46 aa, ARTIFICIAL SEQUENCE
  Engineered albumin binding polypeptide
LACAKSAANSELDCYGCSDFYKRLIDKAKTVEGVEALKDAILAACP

SEQ ID NO: 1312 - protein, 46 aa, ARTIFICIAL SEQUENCE
  Engineered albumin binding polypeptide
LACAKSAANSELDCYGKSDFYKRLIDKAKTVEGVEALKDAILAAKP

SEQ ID NO: 1313 - protein, 46 aa, ARTIFICIAL SEQUENCE
  Engineered albumin binding polypeptide
LACAKEAANAELDKYGCSDFYKRLIDKAKTVEGVEALKDAILAAKP

SEQ ID NO: 1314 - protein, 46 aa, ARTIFICIAL SEQUENCE
  Engineered albumin binding polypeptide
LACAKEAANAELDKYGKSDFYKRLIDKAKTVEGVEALKDAILAACP

SEQ ID NO: 1315 - protein, 46 aa, ARTIFICIAL SEQUENCE
  Engineered albumin binding polypeptide
LACAKEAANAELDKYGCSDFYKRLIDKAKTVEGVEALKDAILAACP

SEQ ID NO: 1316 - protein, 46 aa, ARTIFICIAL SEQUENCE
  Engineered albumin binding polypeptide
LACAKEAANAELDKYGKSDFYKRLIDKAKTVEGVEALKDAILAAKP

SEQ ID NO: 1317 - protein, 46 aa, ARTIFICIAL SEQUENCE
  Engineered albumin binding polypeptide
LACAKEAANSELDKYGCSDFYKRLIDKAKTVEGVEALKDAILAAKP

SEQ ID NO: 1318 - protein, 46 aa, ARTIFICIAL SEQUENCE
  Engineered albumin binding polypeptide
LACAKEAANSELDKYGKSDFYKRLIDKAKTVEGVEALKDAILAACP

SEQ ID NO: 1319 - protein, 46 aa, ARTIFICIAL SEQUENCE
  Engineered albumin binding polypeptide
LACAKEAANSELDKYGCSDFYKRLIDKAKTVEGVEALKDAILAACP

SEQ ID NO: 1320 - protein, 46 aa, ARTIFICIAL SEQUENCE
  Engineered albumin binding polypeptide
LACAKEAANSELDKYGKSDFYKRLIDKAKTVEGVEALKDAILAAKP

SEQ ID NO: 1321 - protein, 46 aa, ARTIFICIAL SEQUENCE
  Engineered albumin binding polypeptide
LACAKESANSELDKYGCSDFYKRLIDKAKTVEGVEALKDAILAAKP

SEQ ID NO: 1322 - protein, 46 aa, ARTIFICIAL SEQUENCE
  Engineered albumin binding polypeptide
LACAKESANSELDKYGKSDFYKRLIDKAKTVEGVEALKDAILAACP

SEQ ID NO: 1323 - protein, 46 aa, ARTIFICIAL SEQUENCE
  Engineered albumin binding polypeptide
LACAKESANSELDKYGCSDFYKRLIDKAKTVEGVEALKDAILAACP

SEQ ID NO: 1324 - protein, 46 aa, ARTIFICIAL SEQUENCE
  Engineered albumin binding polypeptide
LACAKESANSELDKYGKSDFYKRLIDKAKTVEGVEALKDAILAAKP

SEQ ID NO: 1325 - protein, 46 aa, ARTIFICIAL SEQUENCE
  Engineered albumin binding polypeptide
LACAKESANAELDKYGCSDFYKRLIDKAKTVEGVEALKDAILAAKP

SEQ ID NO: 1326 - protein, 46 aa, ARTIFICIAL SEQUENCE
  Engineered albumin binding polypeptide
LACAKESANAELDKYGKSDFYKRLIDKAKTVEGVEALKDAILAACP

SEQ ID NO: 1327 - protein, 46 aa, ARTIFICIAL SEQUENCE
  Engineered albumin binding polypeptide
LACAKESANAELDKYGCSDFYKRLIDKAKTVEGVEALKDAILAACP

SEQ ID NO: 1328 - protein, 46 aa, ARTIFICIAL SEQUENCE
  Engineered albumin binding polypeptide
LACAKESANAELDKYGKSDFYKRLIDKAKTVEGVEALKDAILAAKP

SEQ ID NO: 1329 - protein, 46 aa, ARTIFICIAL SEQUENCE
  Engineered albumin binding polypeptide
LACAKSAANAELDKYGCSDFYKRLIDKAKTVEGVEALKDAILAAKP

SEQ ID NO: 1330 - protein, 46 aa, ARTIFICIAL SEQUENCE
  Engineered albumin binding polypeptide
LACAKSAANAELDKYGKSDFYKRLIDKAKTVEGVEALKDAILAACP

SEQ ID NO: 1331 - protein, 46 aa, ARTIFICIAL SEQUENCE
  Engineered albumin binding polypeptide
LACAKSAANAELDKYGCSDFYKRLIDKAKTVEGVEALKDAILAACP

SEQ ID NO: 1332 - protein, 46 aa, ARTIFICIAL SEQUENCE
  Engineered albumin binding polypeptide
LACAKSAANAELDKYGKSDFYKRLIDKAKTVEGVEALKDAILAAKP

SEQ ID NO: 1333 - protein, 46 aa, ARTIFICIAL SEQUENCE
  Engineered albumin binding polypeptide
LACAKSAANSELDKYGCSDFYKRLIDKAKTVEGVEALKDAILAAKP

SEQ ID NO: 1334 - protein, 46 aa, ARTIFICIAL SEQUENCE
  Engineered albumin binding polypeptide
LACAKSAANSELDKYGKSDFYKRLIDKAKTVEGVEALKDAILAACP

SEQ ID NO: 1335 - protein, 46 aa, ARTIFICIAL SEQUENCE
  Engineered albumin binding polypeptide
LACAKSAANSELDKYGCSDFYKRLIDKAKTVEGVEALKDAILAACP

SEQ ID NO: 1336 - protein, 46 aa, ARTIFICIAL SEQUENCE
  Engineered albumin binding polypeptide
LACAKSAANSELDKYGKSDFYKRLIDKAKTVEGVEALKDAILAAKP

SEQ ID NO: 1337 - protein, 46 aa, ARTIFICIAL SEQUENCE
  Engineered albumin binding polypeptide
LACAKEAANAELDSYGCSDFYKRLIDKAKTVEGVEALKDAILAAKP

SEQ ID NO: 1338 - protein, 46 aa, ARTIFICIAL SEQUENCE
  Engineered albumin binding polypeptide
LACAKEAANAELDSYGKSDFYKRLIDKAKTVEGVEALKDAILAACP

SEQ ID NO: 1339 - protein, 46 aa, ARTIFICIAL SEQUENCE
  Engineered albumin binding polypeptide
LACAKEAANAELDSYGCSDFYKRLIDKAKTVEGVEALKDAILAACP

SEQ ID NO: 1340 - protein, 46 aa, ARTIFICIAL SEQUENCE
  Engineered albumin binding polypeptide
LACAKEAANAELDSYGKSDFYKRLIDKAKTVEGVEALKDAILAAKP

SEQ ID NO: 1341 - protein, 46 aa, ARTIFICIAL SEQUENCE
  Engineered albumin binding polypeptide
LACAKEAANSELDSYGCSDFYKRLIDKAKTVEGVEALKDAILAAKP

SEQ ID NO: 1342 - protein, 46 aa, ARTIFICIAL SEQUENCE
  Engineered albumin binding polypeptide
LACAKEAANSELDSYGKSDFYKRLIDKAKTVEGVEALKDAILAACP

SEQ ID NO: 1343 - protein, 46 aa, ARTIFICIAL SEQUENCE
  Engineered albumin binding polypeptide
LACAKEAANSELDSYGCSDFYKRLIDKAKTVEGVEALKDAILAACP

SEQ ID NO: 1344 - protein, 46 aa, ARTIFICIAL SEQUENCE
  Engineered albumin binding polypeptide
LACAKEAANSELDSYGKSDFYKRLIDKAKTVEGVEALKDAILAAKP

SEQ ID NO: 1345 - protein, 46 aa, ARTIFICIAL SEQUENCE
  Engineered albumin binding polypeptide
LACAKESANSELDSYGCSDFYKRLIDKAKTVEGVEALKDAILAAKP

SEQ ID NO: 1346 - protein, 46 aa, ARTIFICIAL SEQUENCE
  Engineered albumin binding polypeptide
LACAKESANSELDSYGKSDFYKRLIDKAKTVEGVEALKDAILAACP

SEQ ID NO: 1347 - protein, 46 aa, ARTIFICIAL SEQUENCE
  Engineered albumin binding polypeptide
LACAKESANSELDSYGCSDFYKRLIDKAKTVEGVEALKDAILAACP

SEQ ID NO: 1348 - protein, 46 aa, ARTIFICIAL SEQUENCE
  Engineered albumin binding polypeptide
LACAKESANSELDSYGKSDFYKRLIDKAKTVEGVEALKDAILAAKP

SEQ ID NO: 1349 - protein, 46 aa, ARTIFICIAL SEQUENCE
  Engineered albumin binding polypeptide
LACAKESANAELDSYGCSDFYKRLIDKAKTVEGVEALKDAILAAKP

SEQ ID NO: 1350 - protein, 46 aa, ARTIFICIAL SEQUENCE
  Engineered albumin binding polypeptide
LACAKESANAELDSYGKSDFYKRLIDKAKTVEGVEALKDAILAACP

SEQ ID NO: 1351 - protein, 46 aa, ARTIFICIAL SEQUENCE
  Engineered albumin binding polypeptide
LACAKESANAELDSYGCSDFYKRLIDKAKTVEGVEALKDAILAACP

SEQ ID NO: 1352 - protein, 46 aa, ARTIFICIAL SEQUENCE
  Engineered albumin binding polypeptide
LACAKESANAELDSYGKSDFYKRLIDKAKTVEGVEALKDAILAAKP

SEQ ID NO: 1353 - protein, 46 aa, ARTIFICIAL SEQUENCE
  Engineered albumin binding polypeptide
LACAKSAANAELDSYGCSDFYKRLIDKAKTVEGVEALKDAILAAKP

SEQ ID NO: 1354 - protein, 46 aa, ARTIFICIAL SEQUENCE
  Engineered albumin binding polypeptide
LACAKSAANAELDSYGKSDFYKRLIDKAKTVEGVEALKDAILAACP

SEQ ID NO: 1355 - protein, 46 aa, ARTIFICIAL SEQUENCE
  Engineered albumin binding polypeptide
LACAKSAANAELDSYGCSDFYKRLIDKAKTVEGVEALKDAILAACP

SEQ ID NO: 1356 - protein, 46 aa, ARTIFICIAL SEQUENCE
  Engineered albumin binding polypeptide
LACAKSAANAELDSYGKSDFYKRLIDKAKTVEGVEALKDAILAAKP

SEQ ID NO: 1357 - protein, 46 aa, ARTIFICIAL SEQUENCE
  Engineered albumin binding polypeptide
LACAKSAANSELDSYGCSDFYKRLIDKAKTVEGVEALKDAILAAKP

SEQ ID NO: 1358 - protein, 46 aa, ARTIFICIAL SEQUENCE
  Engineered albumin binding polypeptide
LACAKSAANSELDSYGKSDFYKRLIDKAKTVEGVEALKDAILAACP

SEQ ID NO: 1359 - protein, 46 aa, ARTIFICIAL SEQUENCE
  Engineered albumin binding polypeptide
LACAKSAANSELDSYGCSDFYKRLIDKAKTVEGVEALKDAILAACP

SEQ ID NO: 1360 - protein, 46 aa, ARTIFICIAL SEQUENCE
  Engineered albumin binding polypeptide
LACAKSAANSELDSYGKSDFYKRLIDKAKTVEGVEALKDAILAAKP

SEQ ID NO: 1361 - protein, 46 aa, ARTIFICIAL SEQUENCE
  Engineered albumin binding polypeptide
LACAKEAANAELDAYGCSDFYKRLIDKAKTVEGVEALKDAILAAKP

SEQ ID NO: 1362 - protein, 46 aa, ARTIFICIAL SEQUENCE
  Engineered albumin binding polypeptide
LACAKEAANAELDAYGKSDFYKRLIDKAKTVEGVEALKDAILAACP

SEQ ID NO: 1363 - protein, 46 aa, ARTIFICIAL SEQUENCE
  Engineered albumin binding polypeptide
LACAKEAANAELDAYGCSDFYKRLIDKAKTVEGVEALKDAILAACP

SEQ ID NO: 1364 - protein, 46 aa, ARTIFICIAL SEQUENCE
  Engineered albumin binding polypeptide
LACAKEAANAELDAYGKSDFYKRLIDKAKTVEGVEALKDAILAAKP

SEQ ID NO: 1365 - protein, 46 aa, ARTIFICIAL SEQUENCE
  Engineered albumin binding polypeptide
LACAKEAANSELDAYGCSDFYKRLIDKAKTVEGVEALKDAILAAKP

SEQ ID NO: 1366 - protein, 46 aa, ARTIFICIAL SEQUENCE
  Engineered albumin binding polypeptide
LACAKEAANSELDAYGKSDFYKRLIDKAKTVEGVEALKDAILAACP

SEQ ID NO: 1367 - protein, 46 aa, ARTIFICIAL SEQUENCE
  Engineered albumin binding polypeptide
LACAKEAANSELDAYGCSDFYKRLIDKAKTVEGVEALKDAILAACP

SEQ ID NO: 1368 - protein, 46 aa, ARTIFICIAL SEQUENCE
  Engineered albumin binding polypeptide
LACAKEAANSELDAYGKSDFYKRLIDKAKTVEGVEALKDAILAAKP

SEQ ID NO: 1369 - protein, 46 aa, ARTIFICIAL SEQUENCE
  Engineered albumin binding polypeptide
LACAKESANSELDAYGCSDFYKRLIDKAKTVEGVEALKDAILAAKP

SEQ ID NO: 1370 - protein, 46 aa, ARTIFICIAL SEQUENCE
  Engineered albumin binding polypeptide
LACAKESANSELDAYGKSDFYKRLIDKAKTVEGVEALKDAILAACP

SEQ ID NO: 1371 - protein, 46 aa, ARTIFICIAL SEQUENCE
  Engineered albumin binding polypeptide
LACAKESANSELDAYGCSDFYKRLIDKAKTVEGVEALKDAILAACP

SEQ ID NO: 1372 - protein, 46 aa, ARTIFICIAL SEQUENCE
  Engineered albumin binding polypeptide
LACAKESANSELDAYGKSDFYKRLIDKAKTVEGVEALKDAILAAKP

SEQ ID NO: 1373 - protein, 46 aa, ARTIFICIAL SEQUENCE
  Engineered albumin binding polypeptide
LACAKESANAELDAYGCSDFYKRLIDKAKTVEGVEALKDAILAAKP

SEQ ID NO: 1374 - protein, 46 aa, ARTIFICIAL SEQUENCE
  Engineered albumin binding polypeptide
LACAKESANAELDAYGKSDFYKRLIDKAKTVEGVEALKDAILAACP

SEQ ID NO: 1375 - protein, 46 aa, ARTIFICIAL SEQUENCE
  Engineered albumin binding polypeptide
LACAKESANAELDAYGCSDFYKRLIDKAKTVEGVEALKDAILAACP

SEQ ID NO: 1376 - protein, 46 aa, ARTIFICIAL SEQUENCE
  Engineered albumin binding polypeptide
LACAKESANAELDAYGKSDFYKRLIDKAKTVEGVEALKDAILAAKP

SEQ ID NO: 1377 - protein, 46 aa, ARTIFICIAL SEQUENCE
  Engineered albumin binding polypeptide
LACAKSAANAELDAYGCSDFYKRLIDKAKTVEGVEALKDAILAAKP

SEQ ID NO: 1378 - protein, 46 aa, ARTIFICIAL SEQUENCE
  Engineered albumin binding polypeptide
LACAKSAANAELDAYGKSDFYKRLIDKAKTVEGVEALKDAILAACP

SEQ ID NO: 1379 - protein, 46 aa, ARTIFICIAL SEQUENCE
  Engineered albumin binding polypeptide
LACAKSAANAELDAYGCSDFYKRLIDKAKTVEGVEALKDAILAACP

SEQ ID NO: 1380 - protein, 46 aa, ARTIFICIAL SEQUENCE
  Engineered albumin binding polypeptide
LACAKSAANAELDAYGKSDFYKRLIDKAKTVEGVEALKDAILAAKP

SEQ ID NO: 1381 - protein, 46 aa, ARTIFICIAL SEQUENCE
  Engineered albumin binding polypeptide
LACAKSAANSELDAYGCSDFYKRLIDKAKTVEGVEALKDAILAAKP

SEQ ID NO: 1382 - protein, 46 aa, ARTIFICIAL SEQUENCE
  Engineered albumin binding polypeptide
LACAKSAANSELDAYGKSDFYKRLIDKAKTVEGVEALKDAILAACP

SEQ ID NO: 1383 - protein, 46 aa, ARTIFICIAL SEQUENCE
  Engineered albumin binding polypeptide
LACAKSAANSELDAYGCSDFYKRLIDKAKTVEGVEALKDAILAACP

SEQ ID NO: 1384 - protein, 46 aa, ARTIFICIAL SEQUENCE
  Engineered albumin binding polypeptide
LACAKSAANSELDAYGKSDFYKRLIDKAKTVEGVEALKDAILAAKP

SEQ ID NO: 1385 - protein, 46 aa, ARTIFICIAL SEQUENCE
  Engineered albumin binding polypeptide
LAQAKCAANAELDAYGCSDFYKRLIDKAKTVEGVEALKDAILAAKP

SEQ ID NO: 1386 - protein, 46 aa, ARTIFICIAL SEQUENCE
  Engineered albumin binding polypeptide
LAQAKCAANAELDAYGKSDFYKRLIDKAKTVEGVEALKDAILAACP

SEQ ID NO: 1387 - protein, 46 aa, ARTIFICIAL SEQUENCE
  Engineered albumin binding polypeptide
LAQAKCAANAELDAYGCSDFYKRLIDKAKTVEGVEALKDAILAACP

SEQ ID NO: 1388 - protein, 46 aa, ARTIFICIAL SEQUENCE
  Engineered albumin binding polypeptide
LAQAKCAANAELDAYGKSDFYKRLIDKAKTVEGVEALKDAILAAKP

SEQ ID NO: 1389 - protein, 46 aa, ARTIFICIAL SEQUENCE
  Engineered albumin binding polypeptide
LAQAKCAANSELDAYGCSDFYKRLIDKAKTVEGVEALKDAILAAKP

SEQ ID NO: 1390 - protein, 46 aa, ARTIFICIAL SEQUENCE
  Engineered albumin binding polypeptide
LAQAKCAANSELDAYGKSDFYKRLIDKAKTVEGVEALKDAILAACP

SEQ ID NO: 1391 - protein, 46 aa, ARTIFICIAL SEQUENCE
  Engineered albumin binding polypeptide
LAQAKCAANSELDAYGCSDFYKRLIDKAKTVEGVEALKDAILAACP

SEQ ID NO: 1392 - protein, 46 aa, ARTIFICIAL SEQUENCE
  Engineered albumin binding polypeptide
LAQAKCAANSELDAYGKSDFYKRLIDKAKTVEGVEALKDAILAAKP

SEQ ID NO: 1393 - protein, 46 aa, ARTIFICIAL SEQUENCE
  Engineered albumin binding polypeptide
LAQAKCSANSELDAYGCSDFYKRLIDKAKTVEGVEALKDAILAAKP

SEQ ID NO: 1394 - protein, 46 aa, ARTIFICIAL SEQUENCE
  Engineered albumin binding polypeptide
LAQAKCSANSELDAYGKSDFYKRLIDKAKTVEGVEALKDAILAACP

SEQ ID NO: 1395 - protein, 46 aa, ARTIFICIAL SEQUENCE
  Engineered albumin binding polypeptide
LAQAKCSANSELDAYGCSDFYKRLIDKAKTVEGVEALKDAILAACP

SEQ ID NO: 1396 - protein, 46 aa, ARTIFICIAL SEQUENCE
  Engineered albumin binding polypeptide
LAQAKCSANSELDAYGKSDFYKRLIDKAKTVEGVEALKDAILAAKP

SEQ ID NO: 1397 - protein, 46 aa, ARTIFICIAL SEQUENCE
  Engineered albumin binding polypeptide
LAQAKCSANAELDAYGCSDFYKRLIDKAKTVEGVEALKDAILAAKP

SEQ ID NO: 1398 - protein, 46 aa, ARTIFICIAL SEQUENCE
  Engineered albumin binding polypeptide
LAQAKCSANAELDAYGKSDFYKRLIDKAKTVEGVEALKDAILAACP

SEQ ID NO: 1399 - protein, 46 aa, ARTIFICIAL SEQUENCE
  Engineered albumin binding polypeptide
LAQAKCSANAELDAYGCSDFYKRLIDKAKTVEGVEALKDAILAACP

SEQ ID NO: 1400 - protein, 46 aa, ARTIFICIAL SEQUENCE
  Engineered albumin binding polypeptide
LAQAKCSANAELDAYGKSDFYKRLIDKAKTVEGVEALKDAILAAKP

SEQ ID NO: 1401 - protein, 46 aa, ARTIFICIAL SEQUENCE
  Engineered albumin binding polypeptide
LAQAKCAANAELDCYGCSDFYKRLIDKAKTVEGVEALKDAILAAKP

SEQ ID NO: 1402 - protein, 46 aa, ARTIFICIAL SEQUENCE
  Engineered albumin binding polypeptide
LAQAKCAANAELDCYGKSDFYKRLIDKAKTVEGVEALKDAILAACP

SEQ ID NO: 1403 - protein, 46 aa, ARTIFICIAL SEQUENCE
  Engineered albumin binding polypeptide
LAQAKCAANAELDCYGCSDFYKRLIDKAKTVEGVEALKDAILAACP

SEQ ID NO: 1404 - protein, 46 aa, ARTIFICIAL SEQUENCE
  Engineered albumin binding polypeptide
LAQAKCAANAELDCYGKSDFYKRLIDKAKTVEGVEALKDAILAAKP

SEQ ID NO: 1405 - protein, 46 aa, ARTIFICIAL SEQUENCE
  Engineered albumin binding polypeptide
LAQAKCAANSELDCYGCSDFYKRLIDKAKTVEGVEALKDAILAAKP

SEQ ID NO: 1406 - protein, 46 aa, ARTIFICIAL SEQUENCE
  Engineered albumin binding polypeptide
LAQAKCAANSELDCYGKSDFYKRLIDKAKTVEGVEALKDAILAACP

SEQ ID NO: 1407 - protein, 46 aa, ARTIFICIAL SEQUENCE
  Engineered albumin binding polypeptide
LAQAKCAANSELDCYGCSDFYKRLIDKAKTVEGVEALKDAILAACP

SEQ ID NO: 1408 - protein, 46 aa, ARTIFICIAL SEQUENCE
  Engineered albumin binding polypeptide
LAQAKCAANSELDCYGKSDFYKRLIDKAKTVEGVEALKDAILAAKP

SEQ ID NO: 1409 - protein, 46 aa, ARTIFICIAL SEQUENCE
  Engineered albumin binding polypeptide
LAQAKCAANAELDSYGCSDFYKRLIDKAKTVEGVEALKDAILAAKP

SEQ ID NO: 1410 - protein, 46 aa, ARTIFICIAL SEQUENCE
  Engineered albumin binding polypeptide
LAQAKCAANAELDSYGKSDFYKRLIDKAKTVEGVEALKDAILAACP

SEQ ID NO: 1411 - protein, 46 aa, ARTIFICIAL SEQUENCE
  Engineered albumin binding polypeptide
LAQAKCAANAELDSYGCSDFYKRLIDKAKTVEGVEALKDAILAACP

SEQ ID NO: 1412 - protein, 46 aa, ARTIFICIAL SEQUENCE
  Engineered albumin binding polypeptide
LAQAKCAANAELDSYGKSDFYKRLIDKAKTVEGVEALKDAILAAKP

SEQ ID NO: 1413 - protein, 46 aa, ARTIFICIAL SEQUENCE
  Engineered albumin binding polypeptide
LAQAKCAANSELDSYGCSDFYKRLIDKAKTVEGVEALKDAILAAKP

SEQ ID NO: 1414 - protein, 46 aa, ARTIFICIAL SEQUENCE
  Engineered albumin binding polypeptide
LAQAKCAANSELDSYGKSDFYKRLIDKAKTVEGVEALKDAILAACP

SEQ ID NO: 1415 - protein, 46 aa, ARTIFICIAL SEQUENCE
  Engineered albumin binding polypeptide
LAQAKCAANSELDSYGCSDFYKRLIDKAKTVEGVEALKDAILAACP

SEQ ID NO: 1416 - protein, 46 aa, ARTIFICIAL SEQUENCE
  Engineered albumin binding polypeptide
LAQAKCAANSELDSYGKSDFYKRLIDKAKTVEGVEALKDAILAAKP

SEQ ID NO: 1417 - protein, 46 aa, ARTIFICIAL SEQUENCE
  Engineered albumin binding polypeptide
LAQAKCSANSELDSYGCSDFYKRLIDKAKTVEGVEALKDAILAAKP

SEQ ID NO: 1418 - protein, 46 aa, ARTIFICIAL SEQUENCE
  Engineered albumin binding polypeptide
LAQAKCSANSELDSYGKSDFYKRLIDKAKTVEGVEALKDAILAACP

SEQ ID NO: 1419 - protein, 46 aa, ARTIFICIAL SEQUENCE
  Engineered albumin binding polypeptide
LAQAKCSANSELDSYGCSDFYKRLIDKAKTVEGVEALKDAILAACP

SEQ ID NO: 1420 - protein, 46 aa, ARTIFICIAL SEQUENCE
  Engineered albumin binding polypeptide
LAQAKCSANSELDSYGKSDFYKRLIDKAKTVEGVEALKDAILAAKP

SEQ ID NO: 1421 - protein, 46 aa, ARTIFICIAL SEQUENCE
  Engineered albumin binding polypeptide
LAQAKCSANAELDSYGCSDFYKRLIDKAKTVEGVEALKDAILAAKP

SEQ ID NO: 1422 - protein, 46 aa, ARTIFICIAL SEQUENCE
  Engineered albumin binding polypeptide
LAQAKCSANAELDSYGKSDFYKRLIDKAKTVEGVEALKDAILAACP

SEQ ID NO: 1423 - protein, 46 aa, ARTIFICIAL SEQUENCE
  Engineered albumin binding polypeptide
LAQAKCSANAELDSYGCSDFYKRLIDKAKTVEGVEALKDAILAACP

SEQ ID NO: 1424 - protein, 46 aa, ARTIFICIAL SEQUENCE
  Engineered albumin binding polypeptide
LAQAKCSANAELDSYGKSDFYKRLIDKAKTVEGVEALKDAILAAKP

SEQ ID NO: 1425 - protein, 46 aa, ARTIFICIAL SEQUENCE
  Engineered albumin binding polypeptide
LAQAKCAANAELDKYGCSDFYKRLIDKAKTVEGVEALKDAILAAKP

SEQ ID NO: 1426 - protein, 46 aa, ARTIFICIAL SEQUENCE
  Engineered albumin binding polypeptide
LAQAKCAANAELDKYGKSDFYKRLIDKAKTVEGVEALKDAILAACP

SEQ ID NO: 1427 - protein, 46 aa, ARTIFICIAL SEQUENCE
  Engineered albumin binding polypeptide
LAQAKCAANAELDKYGCSDFYKRLIDKAKTVEGVEALKDAILAACP

SEQ ID NO: 1428 - protein, 46 aa, ARTIFICIAL SEQUENCE
  Engineered albumin binding polypeptide
LAQAKCAANAELDKYGKSDFYKRLIDKAKTVEGVEALKDAILAAKP

SEQ ID NO: 1429 - protein, 46 aa, ARTIFICIAL SEQUENCE
  Engineered albumin binding polypeptide
LAQAKCAANSELDKYGCSDFYKRLIDKAKTVEGVEALKDAILAAKP

SEQ ID NO: 1430 - protein, 46 aa, ARTIFICIAL SEQUENCE
  Engineered albumin binding polypeptide
LAQAKCAANSELDKYGKSDFYKRLIDKAKTVEGVEALKDAILAACP

SEQ ID NO: 1431 - protein, 46 aa, ARTIFICIAL SEQUENCE
  Engineered albumin binding polypeptide
LAQAKCAANSELDKYGCSDFYKRLIDKAKTVEGVEALKDAILAACP

SEQ ID NO: 1432 - protein, 46 aa, ARTIFICIAL SEQUENCE
  Engineered albumin binding polypeptide
LAQAKCAANSELDKYGKSDFYKRLIDKAKTVEGVEALKDAILAAKP

SEQ ID NO: 1433 - protein, 46 aa, ARTIFICIAL SEQUENCE
  Engineered albumin binding polypeptide
LASAKCAANAELDAYGCSDFYKRLIDKAKTVEGVEALKDAILAAKP

SEQ ID NO: 1434 - protein, 46 aa, ARTIFICIAL SEQUENCE
  Engineered albumin binding polypeptide
LASAKCAANAELDAYGKSDFYKRLIDKAKTVEGVEALKDAILAACP

SEQ ID NO: 1435 - protein, 46 aa, ARTIFICIAL SEQUENCE
  Engineered albumin binding polypeptide
LASAKCAANAELDAYGCSDFYKRLIDKAKTVEGVEALKDAILAACP

SEQ ID NO: 1436 - protein, 46 aa, ARTIFICIAL SEQUENCE
  Engineered albumin binding polypeptide
LASAKCAANAELDAYGKSDFYKRLIDKAKTVEGVEALKDAILAAKP

SEQ ID NO: 1437 - protein, 46 aa, ARTIFICIAL SEQUENCE
  Engineered albumin binding polypeptide
LASAKCAANSELDAYGCSDFYKRLIDKAKTVEGVEALKDAILAAKP

SEQ ID NO: 1438 - protein, 46 aa, ARTIFICIAL SEQUENCE
  Engineered albumin binding polypeptide
LASAKCAANSELDAYGKSDFYKRLIDKAKTVEGVEALKDAILAACP

SEQ ID NO: 1439 - protein, 46 aa, ARTIFICIAL SEQUENCE
  Engineered albumin binding polypeptide
LASAKCAANSELDAYGCSDFYKRLIDKAKTVEGVEALKDAILAACP

SEQ ID NO: 1440 - protein, 46 aa, ARTIFICIAL SEQUENCE
  Engineered albumin binding polypeptide
LASAKCAANSELDAYGKSDFYKRLIDKAKTVEGVEALKDAILAAKP

SEQ ID NO: 1441 - protein, 46 aa, ARTIFICIAL SEQUENCE
  Engineered albumin binding polypeptide
LASAKCSANSELDAYGCSDFYKRLIDKAKTVEGVEALKDAILAAKP

SEQ ID NO: 1442 - protein, 46 aa, ARTIFICIAL SEQUENCE
  Engineered albumin binding polypeptide
LASAKCSANSELDAYGKSDFYKRLIDKAKTVEGVEALKDAILAACP

SEQ ID NO: 1443 - protein, 46 aa, ARTIFICIAL SEQUENCE
  Engineered albumin binding polypeptide
LASAKCSANSELDAYGCSDFYKRLIDKAKTVEGVEALKDAILAACP

SEQ ID NO: 1444 - protein, 46 aa, ARTIFICIAL SEQUENCE
  Engineered albumin binding polypeptide
LASAKCSANSELDAYGKSDFYKRLIDKAKTVEGVEALKDAILAAKP

SEQ ID NO: 1445 - protein, 46 aa, ARTIFICIAL SEQUENCE
  Engineered albumin binding polypeptide
LASAKCSANAELDAYGCSDFYKRLIDKAKTVEGVEALKDAILAAKP

SEQ ID NO: 1446 - protein, 46 aa, ARTIFICIAL SEQUENCE
  Engineered albumin binding polypeptide
LASAKCSANAELDAYGKSDFYKRLIDKAKTVEGVEALKDAILAACP

SEQ ID NO: 1447 - protein, 46 aa, ARTIFICIAL SEQUENCE
  Engineered albumin binding polypeptide
LASAKCSANAELDAYGCSDFYKRLIDKAKTVEGVEALKDAILAACP

SEQ ID NO: 1448 - protein, 46 aa, ARTIFICIAL SEQUENCE
  Engineered albumin binding polypeptide
LASAKCSANAELDAYGKSDFYKRLIDKAKTVEGVEALKDAILAAKP

SEQ ID NO: 1449 - protein, 46 aa, ARTIFICIAL SEQUENCE
  Engineered albumin binding polypeptide
LASAKCAANAELDCYGCSDFYKRLIDKAKTVEGVEALKDAILAAKP

SEQ ID NO: 1450 - protein, 46 aa, ARTIFICIAL SEQUENCE
  Engineered albumin binding polypeptide
LASAKCAANAELDCYGKSDFYKRLIDKAKTVEGVEALKDAILAACP

SEQ ID NO: 1451 - protein, 46 aa, ARTIFICIAL SEQUENCE
  Engineered albumin binding polypeptide
LASAKCAANAELDCYGCSDFYKRLIDKAKTVEGVEALKDAILAACP

SEQ ID NO: 1452 - protein, 46 aa, ARTIFICIAL SEQUENCE
  Engineered albumin binding polypeptide
LASAKCAANAELDCYGKSDFYKRLIDKAKTVEGVEALKDAILAAKP

SEQ ID NO: 1453 - protein, 46 aa, ARTIFICIAL SEQUENCE
  Engineered albumin binding polypeptide
LASAKCAANSELDCYGCSDFYKRLIDKAKTVEGVEALKDAILAAKP

SEQ ID NO: 1454 - protein, 46 aa, ARTIFICIAL SEQUENCE
  Engineered albumin binding polypeptide
LASAKCAANSELDCYGKSDFYKRLIDKAKTVEGVEALKDAILAACP

SEQ ID NO: 1455 - protein, 46 aa, ARTIFICIAL SEQUENCE
  Engineered albumin binding polypeptide
LASAKCAANSELDCYGCSDFYKRLIDKAKTVEGVEALKDAILAACP

SEQ ID NO: 1456 - protein, 46 aa, ARTIFICIAL SEQUENCE
  Engineered albumin binding polypeptide
LASAKCAANSELDCYGKSDFYKRLIDKAKTVEGVEALKDAILAAKP

SEQ ID NO: 1457 - protein, 46 aa, ARTIFICIAL SEQUENCE
  Engineered albumin binding polypeptide
LASAKCAANAELDSYGCSDFYKRLIDKAKTVEGVEALKDAILAAKP

SEQ ID NO: 1458 - protein, 46 aa, ARTIFICIAL SEQUENCE
  Engineered albumin binding polypeptide
LASAKCAANAELDSYGKSDFYKRLIDKAKTVEGVEALKDAILAACP

SEQ ID NO: 1459 - protein, 46 aa, ARTIFICIAL SEQUENCE
  Engineered albumin binding polypeptide
LASAKCAANAELDSYGCSDFYKRLIDKAKTVEGVEALKDAILAACP

SEQ ID NO: 1460 - protein, 46 aa, ARTIFICIAL SEQUENCE
  Engineered albumin binding polypeptide
LASAKCAANAELDSYGKSDFYKRLIDKAKTVEGVEALKDAILAAKP

SEQ ID NO: 1461 - protein, 46 aa, ARTIFICIAL SEQUENCE
  Engineered albumin binding polypeptide
LASAKCAANSELDSYGCSDFYKRLIDKAKTVEGVEALKDAILAAKP

SEQ ID NO: 1462 - protein, 46 aa, ARTIFICIAL SEQUENCE
  Engineered albumin binding polypeptide
LASAKCAANSELDSYGKSDFYKRLIDKAKTVEGVEALKDAILAACP

SEQ ID NO: 1463 - protein, 46 aa, ARTIFICIAL SEQUENCE
  Engineered albumin binding polypeptide
LASAKCAANSELDSYGCSDFYKRLIDKAKTVEGVEALKDAILAACP

SEQ ID NO: 1464 - protein, 46 aa, ARTIFICIAL SEQUENCE
  Engineered albumin binding polypeptide
LASAKCAANSELDSYGKSDFYKRLIDKAKTVEGVEALKDAILAAKP

SEQ ID NO: 1465 - protein, 46 aa, ARTIFICIAL SEQUENCE
  Engineered albumin binding polypeptide
LASAKCSANSELDSYGCSDFYKRLIDKAKTVEGVEALKDAILAAKP

SEQ ID NO: 1466 - protein, 46 aa, ARTIFICIAL SEQUENCE
  Engineered albumin binding polypeptide
LASAKCSANSELDSYGKSDFYKRLIDKAKTVEGVEALKDAILAACP

SEQ ID NO: 1467 - protein, 46 aa, ARTIFICIAL SEQUENCE
  Engineered albumin binding polypeptide
LASAKCSANSELDSYGCSDFYKRLIDKAKTVEGVEALKDAILAACP

SEQ ID NO: 1468 - protein, 46 aa, ARTIFICIAL SEQUENCE
  Engineered albumin binding polypeptide
LASAKCSANSELDSYGKSDFYKRLIDKAKTVEGVEALKDAILAAKP

SEQ ID NO: 1469 - protein, 46 aa, ARTIFICIAL SEQUENCE
  Engineered albumin binding polypeptide
LASAKCSANAELDSYGCSDFYKRLIDKAKTVEGVEALKDAILAAKP

SEQ ID NO: 1470 - protein, 46 aa, ARTIFICIAL SEQUENCE
  Engineered albumin binding polypeptide
LASAKCSANAELDSYGKSDFYKRLIDKAKTVEGVEALKDAILAACP

SEQ ID NO: 1471 - protein, 46 aa, ARTIFICIAL SEQUENCE
  Engineered albumin binding polypeptide
LASAKCSANAELDSYGCSDFYKRLIDKAKTVEGVEALKDAILAACP

SEQ ID NO: 1472 - protein, 46 aa, ARTIFICIAL SEQUENCE
  Engineered albumin binding polypeptide
LASAKCSANAELDSYGKSDFYKRLIDKAKTVEGVEALKDAILAAKP

SEQ ID NO: 1473 - protein, 46 aa, ARTIFICIAL SEQUENCE
  Engineered albumin binding polypeptide
LASAKCAANAELDKYGCSDFYKRLIDKAKTVEGVEALKDAILAAKP

SEQ ID NO: 1474 - protein, 46 aa, ARTIFICIAL SEQUENCE
  Engineered albumin binding polypeptide
LASAKCAANAELDKYGKSDFYKRLIDKAKTVEGVEALKDAILAACP

SEQ ID NO: 1475 - protein, 46 aa, ARTIFICIAL SEQUENCE
  Engineered albumin binding polypeptide
LASAKCAANAELDKYGCSDFYKRLIDKAKTVEGVEALKDAILAACP

SEQ ID NO: 1476 - protein, 46 aa, ARTIFICIAL SEQUENCE
  Engineered albumin binding polypeptide
LASAKCAANAELDKYGKSDFYKRLIDKAKTVEGVEALKDAILAAKP

SEQ ID NO: 1477 - protein, 46 aa, ARTIFICIAL SEQUENCE
  Engineered albumin binding polypeptide
LASAKCAANSELDKYGCSDFYKRLIDKAKTVEGVEALKDAILAAKP

SEQ ID NO: 1478 - protein, 46 aa, ARTIFICIAL SEQUENCE
  Engineered albumin binding polypeptide
LASAKCAANSELDKYGKSDFYKRLIDKAKTVEGVEALKDAILAACP

SEQ ID NO: 1479 - protein, 46 aa, ARTIFICIAL SEQUENCE
  Engineered albumin binding polypeptide
LASAKCAANSELDKYGCSDFYKRLIDKAKTVEGVEALKDAILAACP

SEQ ID NO: 1480 - protein, 46 aa, ARTIFICIAL SEQUENCE
  Engineered albumin binding polypeptide
LASAKCAANSELDKYGKSDFYKRLIDKAKTVEGVEALKDAILAAKP

SEQ ID NO: 1481 - protein, 46 aa, ARTIFICIAL SEQUENCE
  Engineered albumin binding polypeptide
LAEAKCAANAELDAYGCSDFYKRLIDKAKTVEGVEALKDAILAAKP

SEQ ID NO: 1482 - protein, 46 aa, ARTIFICIAL SEQUENCE
  Engineered albumin binding polypeptide
LAEAKCAANAELDAYGKSDFYKRLIDKAKTVEGVEALKDAILAACP

SEQ ID NO: 1483 - protein, 46 aa, ARTIFICIAL SEQUENCE
  Engineered albumin binding polypeptide
LAEAKCAANAELDAYGCSDFYKRLIDKAKTVEGVEALKDAILAACP

SEQ ID NO: 1484 - protein, 46 aa, ARTIFICIAL SEQUENCE
  Engineered albumin binding polypeptide
LAEAKCAANAELDAYGKSDFYKRLIDKAKTVEGVEALKDAILAAKP

SEQ ID NO: 1485 - protein, 46 aa, ARTIFICIAL SEQUENCE
  Engineered albumin binding polypeptide
LAEAKCAANSELDAYGCSDFYKRLIDKAKTVEGVEALKDAILAAKP

SEQ ID NO: 1486 - protein, 46 aa, ARTIFICIAL SEQUENCE
  Engineered albumin binding polypeptide
LAEAKCAANSELDAYGKSDFYKRLIDKAKTVEGVEALKDAILAACP

SEQ ID NO: 1487 - protein, 46 aa, ARTIFICIAL SEQUENCE
  Engineered albumin binding polypeptide
LAEAKCAANSELDAYGCSDFYKRLIDKAKTVEGVEALKDAILAACP

SEQ ID NO: 1488 - protein, 46 aa, ARTIFICIAL SEQUENCE
  Engineered albumin binding polypeptide
LAEAKCAANSELDAYGKSDFYKRLIDKAKTVEGVEALKDAILAAKP

SEQ ID NO: 1489 - protein, 46 aa, ARTIFICIAL SEQUENCE
  Engineered albumin binding polypeptide
LAEAKCSANSELDAYGCSDFYKRLIDKAKTVEGVEALKDAILAAKP

SEQ ID NO: 1490 - protein, 46 aa, ARTIFICIAL SEQUENCE
  Engineered albumin binding polypeptide
LAEAKCSANSELDAYGKSDFYKRLIDKAKTVEGVEALKDAILAACP

SEQ ID NO: 1491 - protein, 46 aa, ARTIFICIAL SEQUENCE
  Engineered albumin binding polypeptide
LAEAKCSANSELDAYGCSDFYKRLIDKAKTVEGVEALKDAILAACP

SEQ ID NO: 1492 - protein, 46 aa, ARTIFICIAL SEQUENCE
  Engineered albumin binding polypeptide
LAEAKCSANSELDAYGKSDFYKRLIDKAKTVEGVEALKDAILAAKP

SEQ ID NO: 1493 - protein, 46 aa, ARTIFICIAL SEQUENCE
  Engineered albumin binding polypeptide
LAEAKCSANAELDAYGCSDFYKRLIDKAKTVEGVEALKDAILAAKP

SEQ ID NO: 1494 - protein, 46 aa, ARTIFICIAL SEQUENCE
  Engineered albumin binding polypeptide
LAEAKCSANAELDAYGKSDFYKRLIDKAKTVEGVEALKDAILAACP

SEQ ID NO: 1495 - protein, 46 aa, ARTIFICIAL SEQUENCE
  Engineered albumin binding polypeptide
LAEAKCSANAELDAYGCSDFYKRLIDKAKTVEGVEALKDAILAACP

SEQ ID NO: 1496 - protein, 46 aa, ARTIFICIAL SEQUENCE
  Engineered albumin binding polypeptide
LAEAKCSANAELDAYGKSDFYKRLIDKAKTVEGVEALKDAILAAKP

SEQ ID NO: 1497 - protein, 46 aa, ARTIFICIAL SEQUENCE
  Engineered albumin binding polypeptide
LAEAKCAANAELDCYGCSDFYKRLIDKAKTVEGVEALKDAILAAKP

SEQ ID NO: 1498 - protein, 46 aa, ARTIFICIAL SEQUENCE
  Engineered albumin binding polypeptide
LAEAKCAANAELDCYGKSDFYKRLIDKAKTVEGVEALKDAILAACP

SEQ ID NO: 1499 - protein, 46 aa, ARTIFICIAL SEQUENCE
  Engineered albumin binding polypeptide
LAEAKCAANAELDCYGCSDFYKRLIDKAKTVEGVEALKDAILAACP

SEQ ID NO: 1500 - protein, 46 aa, ARTIFICIAL SEQUENCE
  Engineered albumin binding polypeptide
LAEAKCAANAELDCYGKSDFYKRLIDKAKTVEGVEALKDAILAAKP

SEQ ID NO: 1501 - protein, 46 aa, ARTIFICIAL SEQUENCE
  Engineered albumin binding polypeptide
LAEAKCAANSELDCYGCSDFYKRLIDKAKTVEGVEALKDAILAAKP

SEQ ID NO: 1502 - protein, 46 aa, ARTIFICIAL SEQUENCE
  Engineered albumin binding polypeptide
LAEAKCAANSELDCYGKSDFYKRLIDKAKTVEGVEALKDAILAACP

SEQ ID NO: 1503 - protein, 46 aa, ARTIFICIAL SEQUENCE
  Engineered albumin binding polypeptide
LAEAKCAANSELDCYGCSDFYKRLIDKAKTVEGVEALKDAILAACP

SEQ ID NO: 1504 - protein, 46 aa, ARTIFICIAL SEQUENCE
  Engineered albumin binding polypeptide
LAEAKCAANSELDCYGKSDFYKRLIDKAKTVEGVEALKDAILAAKP

SEQ ID NO: 1505 - protein, 46 aa, ARTIFICIAL SEQUENCE
  Engineered albumin binding polypeptide
LAEAKCAANAELDSYGCSDFYKRLIDKAKTVEGVEALKDAILAAKP

SEQ ID NO: 1506 - protein, 46 aa, ARTIFICIAL SEQUENCE
  Engineered albumin binding polypeptide
LAEAKCAANAELDSYGKSDFYKRLIDKAKTVEGVEALKDAILAACP

SEQ ID NO: 1507 - protein, 46 aa, ARTIFICIAL SEQUENCE
  Engineered albumin binding polypeptide
LAEAKCAANAELDSYGCSDFYKRLIDKAKTVEGVEALKDAILAACP

SEQ ID NO: 1508 - protein, 46 aa, ARTIFICIAL SEQUENCE
  Engineered albumin binding polypeptide
LAEAKCAANAELDSYGKSDFYKRLIDKAKTVEGVEALKDAILAAKP

SEQ ID NO: 1509 - protein, 46 aa, ARTIFICIAL SEQUENCE
  Engineered albumin binding polypeptide
LAEAKCAANSELDSYGCSDFYKRLIDKAKTVEGVEALKDAILAAKP

SEQ ID NO: 1510 - protein, 46 aa, ARTIFICIAL SEQUENCE
  Engineered albumin binding polypeptide
LAEAKCAANSELDSYGKSDFYKRLIDKAKTVEGVEALKDAILAACP

SEQ ID NO: 1511 - protein, 46 aa, ARTIFICIAL SEQUENCE
  Engineered albumin binding polypeptide
LAEAKCAANSELDSYGCSDFYKRLIDKAKTVEGVEALKDAILAACP

SEQ ID NO: 1512 - protein, 46 aa, ARTIFICIAL SEQUENCE
  Engineered albumin binding polypeptide
LAEAKCAANSELDSYGKSDFYKRLIDKAKTVEGVEALKDAILAAKP

SEQ ID NO: 1513 - protein, 46 aa, ARTIFICIAL SEQUENCE
  Engineered albumin binding polypeptide
LAEAKCSANSELDSYGCSDFYKRLIDKAKTVEGVEALKDAILAAKP

SEQ ID NO: 1514 - protein, 46 aa, ARTIFICIAL SEQUENCE
  Engineered albumin binding polypeptide
LAEAKCSANSELDSYGKSDFYKRLIDKAKTVEGVEALKDAILAACP

SEQ ID NO: 1515 - protein, 46 aa, ARTIFICIAL SEQUENCE
  Engineered albumin binding polypeptide
LAEAKCSANSELDSYGCSDFYKRLIDKAKTVEGVEALKDAILAACP

SEQ ID NO: 1516 - protein, 46 aa, ARTIFICIAL SEQUENCE
  Engineered albumin binding polypeptide
LAEAKCSANSELDSYGKSDFYKRLIDKAKTVEGVEALKDAILAAKP

SEQ ID NO: 1517 - protein, 46 aa, ARTIFICIAL SEQUENCE
  Engineered albumin binding polypeptide
LAEAKCSANAELDSYGCSDFYKRLIDKAKTVEGVEALKDAILAAKP

SEQ ID NO: 1518 - protein, 46 aa, ARTIFICIAL SEQUENCE
  Engineered albumin binding polypeptide
LAEAKCSANAELDSYGKSDFYKRLIDKAKTVEGVEALKDAILAACP

SEQ ID NO: 1519 - protein, 46 aa, ARTIFICIAL SEQUENCE
  Engineered albumin binding polypeptide
LAEAKCSANAELDSYGCSDFYKRLIDKAKTVEGVEALKDAILAACP

SEQ ID NO: 1520 - protein, 46 aa, ARTIFICIAL SEQUENCE
  Engineered albumin binding polypeptide
LAEAKCSANAELDSYGKSDFYKRLIDKAKTVEGVEALKDAILAAKP

SEQ ID NO: 1521 - protein, 46 aa, ARTIFICIAL SEQUENCE
  Engineered albumin binding polypeptide
LAEAKCAANAELDKYGCSDFYKRLIDKAKTVEGVEALKDAILAAKP

SEQ ID NO: 1522 - protein, 46 aa, ARTIFICIAL SEQUENCE
  Engineered albumin binding polypeptide
LAEAKCAANAELDKYGKSDFYKRLIDKAKTVEGVEALKDAILAACP

SEQ ID NO: 1523 - protein, 46 aa, ARTIFICIAL SEQUENCE
  Engineered albumin binding polypeptide
LAEAKCAANAELDKYGCSDFYKRLIDKAKTVEGVEALKDAILAACP

SEQ ID NO: 1524 - protein, 46 aa, ARTIFICIAL SEQUENCE
  Engineered albumin binding polypeptide
LAEAKCAANAELDKYGKSDFYKRLIDKAKTVEGVEALKDAILAAKP

SEQ ID NO: 1525 - protein, 46 aa, ARTIFICIAL SEQUENCE
  Engineered albumin binding polypeptide
LAEAKCAANSELDKYGCSDFYKRLIDKAKTVEGVEALKDAILAAKP

SEQ ID NO: 1526 - protein, 46 aa, ARTIFICIAL SEQUENCE
  Engineered albumin binding polypeptide
LAEAKCAANSELDKYGKSDFYKRLIDKAKTVEGVEALKDAILAACP

SEQ ID NO: 1527 - protein, 46 aa, ARTIFICIAL SEQUENCE
  Engineered albumin binding polypeptide
LAEAKCAANSELDKYGCSDFYKRLIDKAKTVEGVEALKDAILAACP

SEQ ID NO: 1528 - protein, 46 aa, ARTIFICIAL SEQUENCE
  Engineered albumin binding polypeptide
LAEAKCAANSELDKYGKSDFYKRLIDKAKTVEGVEALKDAILAAKP

SEQ ID NO: 1529 - protein, 46 aa, ARTIFICIAL SEQUENCE
  Engineered albumin binding polypeptide
LACAKCAANAELDAYGCSDFYKRLIDKAKTVEGVEALKDAILAAKP

SEQ ID NO: 1530 - protein, 46 aa, ARTIFICIAL SEQUENCE
  Engineered albumin binding polypeptide
LACAKCAANAELDAYGKSDFYKRLIDKAKTVEGVEALKDAILAACP

SEQ ID NO: 1531 - protein, 46 aa, ARTIFICIAL SEQUENCE
  Engineered albumin binding polypeptide
LACAKCAANAELDAYGCSDFYKRLIDKAKTVEGVEALKDAILAACP

SEQ ID NO: 1532 - protein, 46 aa, ARTIFICIAL SEQUENCE
  Engineered albumin binding polypeptide
LACAKCAANAELDAYGKSDFYKRLIDKAKTVEGVEALKDAILAAKP

SEQ ID NO: 1533 - protein, 46 aa, ARTIFICIAL SEQUENCE
  Engineered albumin binding polypeptide
LACAKCAANSELDAYGCSDFYKRLIDKAKTVEGVEALKDAILAAKP

SEQ ID NO: 1534 - protein, 46 aa, ARTIFICIAL SEQUENCE
  Engineered albumin binding polypeptide
LACAKCAANSELDAYGKSDFYKRLIDKAKTVEGVEALKDAILAACP

SEQ ID NO: 1535 - protein, 46 aa, ARTIFICIAL SEQUENCE
  Engineered albumin binding polypeptide
LACAKCAANSELDAYGCSDFYKRLIDKAKTVEGVEALKDAILAACP

SEQ ID NO: 1536 - protein, 46 aa, ARTIFICIAL SEQUENCE
  Engineered albumin binding polypeptide
LACAKCAANSELDAYGKSDFYKRLIDKAKTVEGVEALKDAILAAKP

SEQ ID NO: 1537 - protein, 46 aa, ARTIFICIAL SEQUENCE
  Engineered albumin binding polypeptide
LACAKCSANSELDAYGCSDFYKRLIDKAKTVEGVEALKDAILAAKP

SEQ ID NO: 1538 - protein, 46 aa, ARTIFICIAL SEQUENCE
  Engineered albumin binding polypeptide
LACAKCSANSELDAYGKSDFYKRLIDKAKTVEGVEALKDAILAACP

SEQ ID NO: 1539 - protein, 46 aa, ARTIFICIAL SEQUENCE
  Engineered albumin binding polypeptide
LACAKCSANSELDAYGCSDFYKRLIDKAKTVEGVEALKDAILAACP

SEQ ID NO: 1540 - protein, 46 aa, ARTIFICIAL SEQUENCE
  Engineered albumin binding polypeptide
LACAKCSANSELDAYGKSDFYKRLIDKAKTVEGVEALKDAILAAKP

SEQ ID NO: 1541 - protein, 46 aa, ARTIFICIAL SEQUENCE
  Engineered albumin binding polypeptide
LACAKCSANAELDAYGCSDFYKRLIDKAKTVEGVEALKDAILAAKP

SEQ ID NO: 1542 - protein, 46 aa, ARTIFICIAL SEQUENCE
  Engineered albumin binding polypeptide
LACAKCSANAELDAYGKSDFYKRLIDKAKTVEGVEALKDAILAACP

SEQ ID NO: 1543 - protein, 46 aa, ARTIFICIAL SEQUENCE
  Engineered albumin binding polypeptide
LACAKCSANAELDAYGCSDFYKRLIDKAKTVEGVEALKDAILAACP

SEQ ID NO: 1544 - protein, 46 aa, ARTIFICIAL SEQUENCE
  Engineered albumin binding polypeptide
LACAKCSANAELDAYGKSDFYKRLIDKAKTVEGVEALKDAILAAKP

SEQ ID NO: 1545 - protein, 46 aa, ARTIFICIAL SEQUENCE
  Engineered albumin binding polypeptide
LACAKCAANAELDCYGCSDFYKRLIDKAKTVEGVEALKDAILAAKP

SEQ ID NO: 1546 - protein, 46 aa, ARTIFICIAL SEQUENCE
  Engineered albumin binding polypeptide
LACAKCAANAELDCYGKSDFYKRLIDKAKTVEGVEALKDAILAACP

SEQ ID NO: 1547 - protein, 46 aa, ARTIFICIAL SEQUENCE
  Engineered albumin binding polypeptide
LACAKCAANAELDCYGCSDFYKRLIDKAKTVEGVEALKDAILAACP

SEQ ID NO: 1548 - protein, 46 aa, ARTIFICIAL SEQUENCE
  Engineered albumin binding polypeptide
LACAKCAANAELDCYGKSDFYKRLIDKAKTVEGVEALKDAILAAKP

SEQ ID NO: 1549 - protein, 46 aa, ARTIFICIAL SEQUENCE
  Engineered albumin binding polypeptide
LACAKCAANSELDCYGCSDFYKRLIDKAKTVEGVEALKDAILAAKP

SEQ ID NO: 1550 - protein, 46 aa, ARTIFICIAL SEQUENCE
  Engineered albumin binding polypeptide
LACAKCAANSELDCYGKSDFYKRLIDKAKTVEGVEALKDAILAACP

SEQ ID NO: 1551 - protein, 46 aa, ARTIFICIAL SEQUENCE
  Engineered albumin binding polypeptide
LACAKCAANSELDCYGCSDFYKRLIDKAKTVEGVEALKDAILAACP

SEQ ID NO: 1552 - protein, 46 aa, ARTIFICIAL SEQUENCE
  Engineered albumin binding polypeptide
LACAKCAANSELDCYGKSDFYKRLIDKAKTVEGVEALKDAILAAKP

SEQ ID NO: 1553 - protein, 46 aa, ARTIFICIAL SEQUENCE
  Engineered albumin binding polypeptide
LACAKCAANAELDSYGCSDFYKRLIDKAKTVEGVEALKDAILAAKP

SEQ ID NO: 1554 - protein, 46 aa, ARTIFICIAL SEQUENCE
  Engineered albumin binding polypeptide
LACAKCAANAELDSYGKSDFYKRLIDKAKTVEGVEALKDAILAACP

SEQ ID NO: 1555 - protein, 46 aa, ARTIFICIAL SEQUENCE
  Engineered albumin binding polypeptide
LACAKCAANAELDSYGCSDFYKRLIDKAKTVEGVEALKDAILAACP

SEQ ID NO: 1556 - protein, 46 aa, ARTIFICIAL SEQUENCE
  Engineered albumin binding polypeptide
LACAKCAANAELDSYGKSDFYKRLIDKAKTVEGVEALKDAILAAKP

SEQ ID NO: 1557 - protein, 46 aa, ARTIFICIAL SEQUENCE
  Engineered albumin binding polypeptide
LACAKCAANSELDSYGCSDFYKRLIDKAKTVEGVEALKDAILAAKP

SEQ ID NO: 1558 - protein, 46 aa, ARTIFICIAL SEQUENCE
  Engineered albumin binding polypeptide
LACAKCAANSELDSYGKSDFYKRLIDKAKTVEGVEALKDAILAACP

SEQ ID NO: 1559 - protein, 46 aa, ARTIFICIAL SEQUENCE
  Engineered albumin binding polypeptide
LACAKCAANSELDSYGCSDFYKRLIDKAKTVEGVEALKDAILAACP

SEQ ID NO: 1560 - protein, 46 aa, ARTIFICIAL SEQUENCE
  Engineered albumin binding polypeptide
LACAKCAANSELDSYGKSDFYKRLIDKAKTVEGVEALKDAILAAKP

SEQ ID NO: 1561 - protein, 46 aa, ARTIFICIAL SEQUENCE
  Engineered albumin binding polypeptide
LACAKCSANSELDSYGCSDFYKRLIDKAKTVEGVEALKDAILAAKP

SEQ ID NO: 1562 - protein, 46 aa, ARTIFICIAL SEQUENCE
  Engineered albumin binding polypeptide
LACAKCSANSELDSYGKSDFYKRLIDKAKTVEGVEALKDAILAACP

SEQ ID NO: 1563 - protein, 46 aa, ARTIFICIAL SEQUENCE
  Engineered albumin binding polypeptide
LACAKCSANSELDSYGCSDFYKRLIDKAKTVEGVEALKDAILAACP

SEQ ID NO: 1564 - protein, 46 aa, ARTIFICIAL SEQUENCE
  Engineered albumin binding polypeptide
LACAKCSANSELDSYGKSDFYKRLIDKAKTVEGVEALKDAILAAKP

SEQ ID NO: 1565 - protein, 46 aa, ARTIFICIAL SEQUENCE
  Engineered albumin binding polypeptide
LACAKCSANAELDSYGCSDFYKRLIDKAKTVEGVEALKDAILAAKP

SEQ ID NO: 1566 - protein, 46 aa, ARTIFICIAL SEQUENCE
  Engineered albumin binding polypeptide
LACAKCSANAELDSYGKSDFYKRLIDKAKTVEGVEALKDAILAACP

SEQ ID NO: 1567 - protein, 46 aa, ARTIFICIAL SEQUENCE
  Engineered albumin binding polypeptide
LACAKCSANAELDSYGCSDFYKRLIDKAKTVEGVEALKDAILAACP

SEQ ID NO: 1568 - protein, 46 aa, ARTIFICIAL SEQUENCE
  Engineered albumin binding polypeptide
LACAKCSANAELDSYGKSDFYKRLIDKAKTVEGVEALKDAILAAKP

SEQ ID NO: 1569 - protein, 46 aa, ARTIFICIAL SEQUENCE
  Engineered albumin binding polypeptide
LACAKCAANAELDKYGCSDFYKRLIDKAKTVEGVEALKDAILAAKP

SEQ ID NO: 1570 - protein, 46 aa, ARTIFICIAL SEQUENCE
  Engineered albumin binding polypeptide
LACAKCAANAELDKYGKSDFYKRLIDKAKTVEGVEALKDAILAACP

SEQ ID NO: 1571 - protein, 46 aa, ARTIFICIAL SEQUENCE
  Engineered albumin binding polypeptide
LACAKCAANAELDKYGCSDFYKRLIDKAKTVEGVEALKDAILAACP

SEQ ID NO: 1572 - protein, 46 aa, ARTIFICIAL SEQUENCE
  Engineered albumin binding polypeptide
LACAKCAANAELDKYGKSDFYKRLIDKAKTVEGVEALKDAILAAKP

SEQ ID NO: 1573 - protein, 46 aa, ARTIFICIAL SEQUENCE
  Engineered albumin binding polypeptide
LACAKCAANSELDKYGCSDFYKRLIDKAKTVEGVEALKDAILAAKP

SEQ ID NO: 1574 - protein, 46 aa, ARTIFICIAL SEQUENCE
  Engineered albumin binding polypeptide
LACAKCAANSELDKYGKSDFYKRLIDKAKTVEGVEALKDAILAACP

SEQ ID NO: 1575 - protein, 46 aa, ARTIFICIAL SEQUENCE
  Engineered albumin binding polypeptide
LACAKCAANSELDKYGCSDFYKRLIDKAKTVEGVEALKDAILAACP

SEQ ID NO: 1576 - protein, 46 aa, ARTIFICIAL SEQUENCE
  Engineered albumin binding polypeptide
LACAKCAANSELDKYGKSDFYKRLIDKAKTVEGVEALKDAILAAKP

SEQ ID NO: 1577 - protein, 46 aa, ARTIFICIAL SEQUENCE
  Engineered albumin binding polypeptide
LAEAKEAANRELDSYGCSDFYKRLIDKAKTVEGVEALKDAILAAKP

SEQ ID NO: 1578 - protein, 46 aa, ARTIFICIAL SEQUENCE
  Engineered albumin binding polypeptide
LAEAKEAANRELDSYGKSDFYKRLIDKAKTVEGVEALKDAILAACP

SEQ ID NO: 1579 - protein, 46 aa, ARTIFICIAL SEQUENCE
  Engineered albumin binding polypeptide
LAEAKEAANRELDSYGCSDFYKRLIDKAKTVEGVEALKDAILAACP

SEQ ID NO: 1580 - protein, 46 aa, ARTIFICIAL SEQUENCE
  Engineered albumin binding polypeptide
LAEAKEAANRELDSYGKSDFYKRLIDKAKTVEGVEALKDAILAAKP

SEQ ID NO: 1581 - protein, 46 aa, ARTIFICIAL SEQUENCE
  Engineered albumin binding polypeptide
LAEAKEAANAELDSYGCSDFYKRLIEKAKTVEGVEALKDAILAAKP

SEQ ID NO: 1582 - protein, 46 aa, ARTIFICIAL SEQUENCE
  Engineered albumin binding polypeptide
LAEAKEAANAELDSYGKSDFYKRLIEKAKTVEGVEALKDAILAACP

SEQ ID NO: 1583 - protein, 46 aa, ARTIFICIAL SEQUENCE
  Engineered albumin binding polypeptide
LAEAKEAANAELDSYGCSDFYKRLIEKAKTVEGVEALKDAILAACP

SEQ ID NO: 1584 - protein, 46 aa, ARTIFICIAL SEQUENCE
  Engineered albumin binding polypeptide
LAEAKEAANAELDSYGKSDFYKRLIEKAKTVEGVEALKDAILAAKP

SEQ ID NO: 1585 - protein, 46 aa, ARTIFICIAL SEQUENCE
  Engineered albumin binding polypeptide
LAEAKEAANAELDSYGCSDFYKRLIDKAKTVEGVEALKEAILAAKP

SEQ ID NO: 1586 - protein, 46 aa, ARTIFICIAL SEQUENCE
  Engineered albumin binding polypeptide
LAEAKEAANAELDSYGKSDFYKRLIDKAKTVEGVEALKEAILAACP

SEQ ID NO: 1587 - protein, 46 aa, ARTIFICIAL SEQUENCE
  Engineered albumin binding polypeptide
LAEAKEAANAELDSYGCSDFYKRLIDKAKTVEGVEALKEAILAACP

SEQ ID NO: 1588 - protein, 46 aa, ARTIFICIAL SEQUENCE
  Engineered albumin binding polypeptide
LAEAKEAANAELDSYGKSDFYKRLIDKAKTVEGVEALKEAILAAKP

SEQ ID NO: 1589 - protein, 46 aa, ARTIFICIAL SEQUENCE
  Engineered albumin binding polypeptide
LAEAKEAANAELDSYGCSDFYKRLIEKAKTVEGVEALKEAILAAKP

SEQ ID NO: 1590 - protein, 46 aa, ARTIFICIAL SEQUENCE
  Engineered albumin binding polypeptide
LAEAKEAANAELDSYGKSDFYKRLIEKAKTVEGVEALKEAILAACP

SEQ ID NO: 1591 - protein, 46 aa, ARTIFICIAL SEQUENCE
  Engineered albumin binding polypeptide
LAEAKEAANAELDSYGCSDFYKRLIEKAKTVEGVEALKEAILAACP

SEQ ID NO: 1592 - protein, 46 aa, ARTIFICIAL SEQUENCE
  Engineered albumin binding polypeptide
LAEAKEAANAELDSYGKSDFYKRLIEKAKTVEGVEALKEAILAAKP

SEQ ID NO: 1593 - protein, 46 aa, ARTIFICIAL SEQUENCE
  Engineered albumin binding polypeptide
LAEAKEAANRELDSYGCSDFYKRLIEKAKTVEGVEALKEAILAAKP

SEQ ID NO: 1594 - protein, 46 aa, ARTIFICIAL SEQUENCE
  Engineered albumin binding polypeptide
LAEAKEAANRELDSYGKSDFYKRLIEKAKTVEGVEALKEAILAACP

SEQ ID NO: 1595 - protein, 46 aa, ARTIFICIAL SEQUENCE
  Engineered albumin binding polypeptide
LAEAKEAANRELDSYGCSDFYKRLIEKAKTVEGVEALKEAILAACP

SEQ ID NO: 1596 - protein, 46 aa, ARTIFICIAL SEQUENCE
  Engineered albumin binding polypeptide
LAEAKEAANRELDSYGKSDFYKRLIEKAKTVEGVEALKEAILAAKP

SEQ ID NO: 1597 - protein, 46 aa, ARTIFICIAL SEQUENCE
  Engineered albumin binding polypeptide
LAEAKEAANAELDSYGCSDFYKRLIDKAKTVEGVEALKDAILKAKP

SEQ ID NO: 1598 - protein, 46 aa, ARTIFICIAL SEQUENCE
  Engineered albumin binding polypeptide
LAEAKEAANAELDSYGKSDFYKRLIDKAKTVEGVEALKDAILKACP

SEQ ID NO: 1599 - protein, 46 aa, ARTIFICIAL SEQUENCE
  Engineered albumin binding polypeptide
LAEAKEAANAELDSYGCSDFYKRLIDKAKTVEGVEALKDAILKACP

SEQ ID NO: 1600 - protein, 46 aa, ARTIFICIAL SEQUENCE
  Engineered albumin binding polypeptide
LAEAKEAANAELDSYGKSDFYKRLIDKAKTVEGVEALKDAILKAKP

SEQ ID NO: 1601 - protein, 46 aa, ARTIFICIAL SEQUENCE
  Engineered albumin binding polypeptide
LAEAKEAANAELDSYGCSDFYKRLIDKAKTVEGVEALKDAILASKP

SEQ ID NO: 1602 - protein, 46 aa, ARTIFICIAL SEQUENCE
  Engineered albumin binding polypeptide
LAEAKEAANAELDSYGKSDFYKRLIDKAKTVEGVEALKDAILASCP

SEQ ID NO: 1603 - protein, 46 aa, ARTIFICIAL SEQUENCE
  Engineered albumin binding polypeptide
LAEAKEAANAELDSYGCSDFYKRLIDKAKTVEGVEALKDAILASCP

SEQ ID NO: 1604 - protein, 46 aa, ARTIFICIAL SEQUENCE
  Engineered albumin binding polypeptide
LAEAKEAANAELDSYGKSDFYKRLIDKAKTVEGVEALKDAILASKP

SEQ ID NO: 1605 - protein, 46 aa, ARTIFICIAL SEQUENCE
  Engineered albumin binding polypeptide
LAEAKEAANRELDAYGCSDFYKRLIDKAKTVEGVEALKDAILAAKP

SEQ ID NO: 1606 - protein, 46 aa, ARTIFICIAL SEQUENCE
  Engineered albumin binding polypeptide
LAEAKEAANRELDAYGKSDFYKRLIDKAKTVEGVEALKDAILAACP

SEQ ID NO: 1607 - protein, 46 aa, ARTIFICIAL SEQUENCE
  Engineered albumin binding polypeptide
LAEAKEAANRELDAYGCSDFYKRLIDKAKTVEGVEALKDAILAACP

SEQ ID NO: 1608 - protein, 46 aa, ARTIFICIAL SEQUENCE
  Engineered albumin binding polypeptide
LAEAKEAANRELDAYGKSDFYKRLIDKAKTVEGVEALKDAILAAKP

SEQ ID NO: 1609 - protein, 46 aa, ARTIFICIAL SEQUENCE
  Engineered albumin binding polypeptide
LAEAKEAANAELDAYGCSDFYKRLIEKAKTVEGVEALKDAILAAKP

SEQ ID NO: 1610 - protein, 46 aa, ARTIFICIAL SEQUENCE
  Engineered albumin binding polypeptide
LAEAKEAANAELDAYGKSDFYKRLIEKAKTVEGVEALKDAILAACP

SEQ ID NO: 1611 - protein, 46 aa, ARTIFICIAL SEQUENCE
  Engineered albumin binding polypeptide
LAEAKEAANAELDAYGCSDFYKRLIEKAKTVEGVEALKDAILAACP

SEQ ID NO: 1612 - protein, 46 aa, ARTIFICIAL SEQUENCE
  Engineered albumin binding polypeptide
LAEAKEAANAELDAYGKSDFYKRLIEKAKTVEGVEALKDAILAAKP

SEQ ID NO: 1613 - protein, 46 aa, ARTIFICIAL SEQUENCE
  Engineered albumin binding polypeptide
LAEAKEAANAELDAYGCSDFYKRLIDKAKTVEGVEALKEAILAAKP

SEQ ID NO: 1614 - protein, 46 aa, ARTIFICIAL SEQUENCE
  Engineered albumin binding polypeptide
LAEAKEAANAELDAYGKSDFYKRLIDKAKTVEGVEALKEAILAACP

SEQ ID NO: 1615 - protein, 46 aa, ARTIFICIAL SEQUENCE
  Engineered albumin binding polypeptide
LAEAKEAANAELDAYGCSDFYKRLIDKAKTVEGVEALKEAILAACP

SEQ ID NO: 1616 - protein, 46 aa, ARTIFICIAL SEQUENCE
  Engineered albumin binding polypeptide
LAEAKEAANAELDAYGKSDFYKRLIDKAKTVEGVEALKEAILAAKP

SEQ ID NO: 1617 - protein, 46 aa, ARTIFICIAL SEQUENCE
  Engineered albumin binding polypeptide
LAEAKEAANAELDAYGCSDFYKRLIEKAKTVEGVEALKEAILAAKP

SEQ ID NO: 1618 - protein, 46 aa, ARTIFICIAL SEQUENCE
  Engineered albumin binding polypeptide
LAEAKEAANAELDAYGKSDFYKRLIEKAKTVEGVEALKEAILAACP

SEQ ID NO: 1619 - protein, 46 aa, ARTIFICIAL SEQUENCE
  Engineered albumin binding polypeptide
LAEAKEAANAELDAYGCSDFYKRLIEKAKTVEGVEALKEAILAACP

SEQ ID NO: 1620 - protein, 46 aa, ARTIFICIAL SEQUENCE
  Engineered albumin binding polypeptide
LAEAKEAANAELDAYGKSDFYKRLIEKAKTVEGVEALKEAILAAKP

SEQ ID NO: 1621 - protein, 46 aa, ARTIFICIAL SEQUENCE
  Engineered albumin binding polypeptide
LAEAKEAANRELDAYGCSDFYKRLIEKAKTVEGVEALKEAILAAKP

SEQ ID NO: 1622 - protein, 46 aa, ARTIFICIAL SEQUENCE
  Engineered albumin binding polypeptide
LAEAKEAANRELDAYGKSDFYKRLIEKAKTVEGVEALKEAILAACP

SEQ ID NO: 1623 - protein, 46 aa, ARTIFICIAL SEQUENCE
  Engineered albumin binding polypeptide
LAEAKEAANRELDAYGCSDFYKRLIEKAKTVEGVEALKEAILAACP

SEQ ID NO: 1624 - protein, 46 aa, ARTIFICIAL SEQUENCE
  Engineered albumin binding polypeptide
LAEAKEAANRELDAYGKSDFYKRLIEKAKTVEGVEALKEAILAAKP

SEQ ID NO: 1625 - protein, 46 aa, ARTIFICIAL SEQUENCE
  Engineered albumin binding polypeptide
LAEAKEAANAELDAYGCSDFYKRLIDKAKTVEGVEALKDAILKAKP

SEQ ID NO: 1626 - protein, 46 aa, ARTIFICIAL SEQUENCE
  Engineered albumin binding polypeptide
LAEAKEAANAELDAYGKSDFYKRLIDKAKTVEGVEALKDAILKACP

SEQ ID NO: 1627 - protein, 46 aa, ARTIFICIAL SEQUENCE
  Engineered albumin binding polypeptide
LAEAKEAANAELDAYGCSDFYKRLIDKAKTVEGVEALKDAILKACP

SEQ ID NO: 1628 - protein, 46 aa, ARTIFICIAL SEQUENCE
  Engineered albumin binding polypeptide
LAEAKEAANAELDAYGKSDFYKRLIDKAKTVEGVEALKDAILKAKP

SEQ ID NO: 1629 - protein, 46 aa, ARTIFICIAL SEQUENCE
  Engineered albumin binding polypeptide
LAEAKEAANAELDAYGCSDFYKRLIDKAKTVEGVEALKDAILASKP

SEQ ID NO: 1630 - protein, 46 aa, ARTIFICIAL SEQUENCE
  Engineered albumin binding polypeptide
LAEAKEAANAELDAYGKSDFYKRLIDKAKTVEGVEALKDAILASCP

SEQ ID NO: 1631 - protein, 46 aa, ARTIFICIAL SEQUENCE
  Engineered albumin binding polypeptide
LAEAKEAANAELDAYGCSDFYKRLIDKAKTVEGVEALKDAILASCP

SEQ ID NO: 1632 - protein, 46 aa, ARTIFICIAL SEQUENCE
  Engineered albumin binding polypeptide
LAEAKEAANAELDAYGKSDFYKRLIDKAKTVEGVEALKDAILASKP

SEQ ID NO: 1633 - protein, 46 aa, ARTIFICIAL SEQUENCE
  Engineered albumin binding polypeptide
LAQAKEAANRELDAYGCSDFYKRLIDKAKTVEGVEALKDAILAAKP

SEQ ID NO: 1634 - protein, 46 aa, ARTIFICIAL SEQUENCE
  Engineered albumin binding polypeptide
LAQAKEAANRELDAYGKSDFYKRLIDKAKTVEGVEALKDAILAACP

SEQ ID NO: 1635 - protein, 46 aa, ARTIFICIAL SEQUENCE
  Engineered albumin binding polypeptide
LAQAKEAANRELDAYGCSDFYKRLIDKAKTVEGVEALKDAILAACP

SEQ ID NO: 1636 - protein, 46 aa, ARTIFICIAL SEQUENCE
  Engineered albumin binding polypeptide
LAQAKEAANRELDAYGKSDFYKRLIDKAKTVEGVEALKDAILAAKP

SEQ ID NO: 1637 - protein, 46 aa, ARTIFICIAL SEQUENCE
  Engineered albumin binding polypeptide
LAQAKEAANAELDAYGCSDFYKRLIEKAKTVEGVEALKDAILAAKP

SEQ ID NO: 1638 - protein, 46 aa, ARTIFICIAL SEQUENCE
  Engineered albumin binding polypeptide
LAQAKEAANAELDAYGKSDFYKRLIEKAKTVEGVEALKDAILAACP

SEQ ID NO: 1639 - protein, 46 aa, ARTIFICIAL SEQUENCE
  Engineered albumin binding polypeptide
LAQAKEAANAELDAYGCSDFYKRLIEKAKTVEGVEALKDAILAACP

SEQ ID NO: 1640 - protein, 46 aa, ARTIFICIAL SEQUENCE
  Engineered albumin binding polypeptide
LAQAKEAANAELDAYGKSDFYKRLIEKAKTVEGVEALKDAILAAKP

SEQ ID NO: 1641 - protein, 46 aa, ARTIFICIAL SEQUENCE
  Engineered albumin binding polypeptide
LAQAKEAANAELDAYGCSDFYKRLIDKAKTVEGVEALKEAILAAKP

SEQ ID NO: 1642 - protein, 46 aa, ARTIFICIAL SEQUENCE
  Engineered albumin binding polypeptide
LAQAKEAANAELDAYGKSDFYKRLIDKAKTVEGVEALKEAILAACP

SEQ ID NO: 1643 - protein, 46 aa, ARTIFICIAL SEQUENCE
  Engineered albumin binding polypeptide
LAQAKEAANAELDAYGCSDFYKRLIDKAKTVEGVEALKEAILAACP

SEQ ID NO: 1644 - protein, 46 aa, ARTIFICIAL SEQUENCE
  Engineered albumin binding polypeptide
LAQAKEAANAELDAYGKSDFYKRLIDKAKTVEGVEALKEAILAAKP

SEQ ID NO: 1645 - protein, 46 aa, ARTIFICIAL SEQUENCE
  Engineered albumin binding polypeptide
LAQAKEAANAELDAYGCSDFYKRLIEKAKTVEGVEALKEAILAAKP

SEQ ID NO: 1646 - protein, 46 aa, ARTIFICIAL SEQUENCE
  Engineered albumin binding polypeptide
LAQAKEAANAELDAYGKSDFYKRLIEKAKTVEGVEALKEAILAACP

SEQ ID NO: 1647 - protein, 46 aa, ARTIFICIAL SEQUENCE
  Engineered albumin binding polypeptide
LAQAKEAANAELDAYGCSDFYKRLIEKAKTVEGVEALKEAILAACP

SEQ ID NO: 1648 - protein, 46 aa, ARTIFICIAL SEQUENCE
  Engineered albumin binding polypeptide
LAQAKEAANAELDAYGKSDFYKRLIEKAKTVEGVEALKEAILAAKP

SEQ ID NO: 1649 - protein, 46 aa, ARTIFICIAL SEQUENCE
  Engineered albumin binding polypeptide
LAQAKEAANRELDAYGCSDFYKRLIEKAKTVEGVEALKEAILAAKP

SEQ ID NO: 1650 - protein, 46 aa, ARTIFICIAL SEQUENCE
  Engineered albumin binding polypeptide
LAQAKEAANRELDAYGKSDFYKRLIEKAKTVEGVEALKEAILAACP

SEQ ID NO: 1651 - protein, 46 aa, ARTIFICIAL SEQUENCE
  Engineered albumin binding polypeptide
LAQAKEAANRELDAYGCSDFYKRLIEKAKTVEGVEALKEAILAACP

SEQ ID NO: 1652 - protein, 46 aa, ARTIFICIAL SEQUENCE
  Engineered albumin binding polypeptide
LAQAKEAANRELDAYGKSDFYKRLIEKAKTVEGVEALKEAILAAKP

SEQ ID NO: 1653 - protein, 46 aa, ARTIFICIAL SEQUENCE
  Engineered albumin binding polypeptide
LAQAKEAANAELDAYGCSDFYKRLIDKAKTVEGVEALKDAILKAKP

SEQ ID NO: 1654 - protein, 46 aa, ARTIFICIAL SEQUENCE
  Engineered albumin binding polypeptide
LAQAKEAANAELDAYGKSDFYKRLIDKAKTVEGVEALKDAILKACP

SEQ ID NO: 1655 - protein, 46 aa, ARTIFICIAL SEQUENCE
  Engineered albumin binding polypeptide
LAQAKEAANAELDAYGCSDFYKRLIDKAKTVEGVEALKDAILKACP

SEQ ID NO: 1656 - protein, 46 aa, ARTIFICIAL SEQUENCE
  Engineered albumin binding polypeptide
LAQAKEAANAELDAYGKSDFYKRLIDKAKTVEGVEALKDAILKAKP

SEQ ID NO: 1657 - protein, 46 aa, ARTIFICIAL SEQUENCE
  Engineered albumin binding polypeptide
LAQAKEAANAELDAYGCSDFYKRLIDKAKTVEGVEALKDAILASKP

SEQ ID NO: 1658 - protein, 46 aa, ARTIFICIAL SEQUENCE
  Engineered albumin binding polypeptide
LAQAKEAANAELDAYGKSDFYKRLIDKAKTVEGVEALKDAILASCP

SEQ ID NO: 1659 - protein, 46 aa, ARTIFICIAL SEQUENCE
  Engineered albumin binding polypeptide
LAQAKEAANAELDAYGCSDFYKRLIDKAKTVEGVEALKDAILASCP

SEQ ID NO: 1660 - protein, 46 aa, ARTIFICIAL SEQUENCE
  Engineered albumin binding polypeptide
LAQAKEAANAELDAYGKSDFYKRLIDKAKTVEGVEALKDAILASKP

SEQ ID NO: 1661 - protein, 46 aa, ARTIFICIAL SEQUENCE
  Engineered albumin binding polypeptide
LAQAKEAANRELDSYGCSDFYKRLIDKAKTVEGVEALKDAILAAKP

SEQ ID NO: 1662 - protein, 46 aa, ARTIFICIAL SEQUENCE
  Engineered albumin binding polypeptide
LAQAKEAANRELDSYGKSDFYKRLIDKAKTVEGVEALKDAILAACP

SEQ ID NO: 1663 - protein, 46 aa, ARTIFICIAL SEQUENCE
  Engineered albumin binding polypeptide
LAQAKEAANRELDSYGCSDFYKRLIDKAKTVEGVEALKDAILAACP

SEQ ID NO: 1664 - protein, 46 aa, ARTIFICIAL SEQUENCE
  Engineered albumin binding polypeptide
LAQAKEAANRELDSYGKSDFYKRLIDKAKTVEGVEALKDAILAAKP

SEQ ID NO: 1665 - protein, 46 aa, ARTIFICIAL SEQUENCE
  Engineered albumin binding polypeptide
LAQAKEAANAELDSYGCSDFYKRLIEKAKTVEGVEALKDAILAAKP

SEQ ID NO: 1666 - protein, 46 aa, ARTIFICIAL SEQUENCE
  Engineered albumin binding polypeptide
LAQAKEAANAELDSYGKSDFYKRLIEKAKTVEGVEALKDAILAACP

SEQ ID NO: 1667 - protein, 46 aa, ARTIFICIAL SEQUENCE
  Engineered albumin binding polypeptide
LAQAKEAANAELDSYGCSDFYKRLIEKAKTVEGVEALKDAILAACP

SEQ ID NO: 1668 - protein, 46 aa, ARTIFICIAL SEQUENCE
  Engineered albumin binding polypeptide
LAQAKEAANAELDSYGKSDFYKRLIEKAKTVEGVEALKDAILAAKP

SEQ ID NO: 1669 - protein, 46 aa, ARTIFICIAL SEQUENCE
  Engineered albumin binding polypeptide
LAQAKEAANAELDSYGCSDFYKRLIDKAKTVEGVEALKEAILAAKP

SEQ ID NO: 1670 - protein, 46 aa, ARTIFICIAL SEQUENCE
  Engineered albumin binding polypeptide
LAQAKEAANAELDSYGKSDFYKRLIDKAKTVEGVEALKEAILAACP

SEQ ID NO: 1671 - protein, 46 aa, ARTIFICIAL SEQUENCE
  Engineered albumin binding polypeptide
LAQAKEAANAELDSYGCSDFYKRLIDKAKTVEGVEALKEAILAACP

SEQ ID NO: 1672 - protein, 46 aa, ARTIFICIAL SEQUENCE
  Engineered albumin binding polypeptide
LAQAKEAANAELDSYGKSDFYKRLIDKAKTVEGVEALKEAILAAKP

SEQ ID NO: 1673 - protein, 46 aa, ARTIFICIAL SEQUENCE
  Engineered albumin binding polypeptide
LAQAKEAANAELDSYGCSDFYKRLIEKAKTVEGVEALKEAILAAKP

SEQ ID NO: 1674 - protein, 46 aa, ARTIFICIAL SEQUENCE
  Engineered albumin binding polypeptide
LAQAKEAANAELDSYGKSDFYKRLIEKAKTVEGVEALKEAILAACP

SEQ ID NO: 1675 - protein, 46 aa, ARTIFICIAL SEQUENCE
  Engineered albumin binding polypeptide
LAQAKEAANAELDSYGCSDFYKRLIEKAKTVEGVEALKEAILAACP

SEQ ID NO: 1676 - protein, 46 aa, ARTIFICIAL SEQUENCE
  Engineered albumin binding polypeptide
LAQAKEAANAELDSYGKSDFYKRLIEKAKTVEGVEALKEAILAAKP

SEQ ID NO: 1677 - protein, 46 aa, ARTIFICIAL SEQUENCE
  Engineered albumin binding polypeptide
LAQAKEAANRELDSYGCSDFYKRLIEKAKTVEGVEALKEAILAAKP

SEQ ID NO: 1678 - protein, 46 aa, ARTIFICIAL SEQUENCE
  Engineered albumin binding polypeptide
LAQAKEAANRELDSYGKSDFYKRLIEKAKTVEGVEALKEAILAACP

SEQ ID NO: 1679 - protein, 46 aa, ARTIFICIAL SEQUENCE
  Engineered albumin binding polypeptide
LAQAKEAANRELDSYGCSDFYKRLIEKAKTVEGVEALKEAILAACP

SEQ ID NO: 1680 - protein, 46 aa, ARTIFICIAL SEQUENCE
  Engineered albumin binding polypeptide
LAQAKEAANRELDSYGKSDFYKRLIEKAKTVEGVEALKEAILAAKP

SEQ ID NO: 1681 - protein, 46 aa, ARTIFICIAL SEQUENCE
  Engineered albumin binding polypeptide
LAQAKEAANAELDSYGCSDFYKRLIDKAKTVEGVEALKDAILKAKP

SEQ ID NO: 1682 - protein, 46 aa, ARTIFICIAL SEQUENCE
  Engineered albumin binding polypeptide
LAQAKEAANAELDSYGKSDFYKRLIDKAKTVEGVEALKDAILKACP

SEQ ID NO: 1683 - protein, 46 aa, ARTIFICIAL SEQUENCE
  Engineered albumin binding polypeptide
LAQAKEAANAELDSYGCSDFYKRLIDKAKTVEGVEALKDAILKACP

SEQ ID NO: 1684 - protein, 46 aa, ARTIFICIAL SEQUENCE
  Engineered albumin binding polypeptide
LAQAKEAANAELDSYGKSDFYKRLIDKAKTVEGVEALKDAILKAKP

SEQ ID NO: 1685 - protein, 46 aa, ARTIFICIAL SEQUENCE
  Engineered albumin binding polypeptide
LAQAKEAANAELDSYGCSDFYKRLIDKAKTVEGVEALKDAILASKP

SEQ ID NO: 1686 - protein, 46 aa, ARTIFICIAL SEQUENCE
  Engineered albumin binding polypeptide
LAQAKEAANAELDSYGKSDFYKRLIDKAKTVEGVEALKDAILASCP

SEQ ID NO: 1687 - protein, 46 aa, ARTIFICIAL SEQUENCE
  Engineered albumin binding polypeptide
LAQAKEAANAELDSYGCSDFYKRLIDKAKTVEGVEALKDAILASCP

SEQ ID NO: 1688 - protein, 46 aa, ARTIFICIAL SEQUENCE
  Engineered albumin binding polypeptide
LAQAKEAANAELDSYGKSDFYKRLIDKAKTVEGVEALKDAILASKP

SEQ ID NO: 1689 - protein, 46 aa, ARTIFICIAL SEQUENCE
  Engineered albumin binding polypeptide
LAEAKEAANRELDCYGCSDFYKRLIDKAKTVEGVEALKDAILAAKP

SEQ ID NO: 1690 - protein, 46 aa, ARTIFICIAL SEQUENCE
  Engineered albumin binding polypeptide
LAEAKEAANRELDCYGKSDFYKRLIDKAKTVEGVEALKDAILAACP

SEQ ID NO: 1691 - protein, 46 aa, ARTIFICIAL SEQUENCE
  Engineered albumin binding polypeptide
LAEAKEAANRELDCYGCSDFYKRLIDKAKTVEGVEALKDAILAACP

SEQ ID NO: 1692 - protein, 46 aa, ARTIFICIAL SEQUENCE
  Engineered albumin binding polypeptide
LAEAKEAANRELDCYGKSDFYKRLIDKAKTVEGVEALKDAILAAKP

SEQ ID NO: 1693 - protein, 46 aa, ARTIFICIAL SEQUENCE
  Engineered albumin binding polypeptide
LAEAKEAANAELDCYGCSDFYKRLIEKAKTVEGVEALKDAILAAKP

SEQ ID NO: 1694 - protein, 46 aa, ARTIFICIAL SEQUENCE
  Engineered albumin binding polypeptide
LAEAKEAANAELDCYGKSDFYKRLIEKAKTVEGVEALKDAILAACP

SEQ ID NO: 1695 - protein, 46 aa, ARTIFICIAL SEQUENCE
  Engineered albumin binding polypeptide
LAEAKEAANAELDCYGCSDFYKRLIEKAKTVEGVEALKDAILAACP

SEQ ID NO: 1696 - protein, 46 aa, ARTIFICIAL SEQUENCE
  Engineered albumin binding polypeptide
LAEAKEAANAELDCYGKSDFYKRLIEKAKTVEGVEALKDAILAAKP

SEQ ID NO: 1697 - protein, 46 aa, ARTIFICIAL SEQUENCE
  Engineered albumin binding polypeptide
LAEAKEAANAELDCYGCSDFYKRLIDKAKTVEGVEALKEAILAAKP

SEQ ID NO: 1698 - protein, 46 aa, ARTIFICIAL SEQUENCE
  Engineered albumin binding polypeptide
LAEAKEAANAELDCYGKSDFYKRLIDKAKTVEGVEALKEAILAACP

SEQ ID NO: 1699 - protein, 46 aa, ARTIFICIAL SEQUENCE
  Engineered albumin binding polypeptide
LAEAKEAANAELDCYGCSDFYKRLIDKAKTVEGVEALKEAILAACP

SEQ ID NO: 1700 - protein, 46 aa, ARTIFICIAL SEQUENCE
  Engineered albumin binding polypeptide
LAEAKEAANAELDCYGKSDFYKRLIDKAKTVEGVEALKEAILAAKP

SEQ ID NO: 1701 - protein, 46 aa, ARTIFICIAL SEQUENCE
  Engineered albumin binding polypeptide
LAEAKEAANAELDCYGCSDFYKRLIEKAKTVEGVEALKEAILAAKP

SEQ ID NO: 1702 - protein, 46 aa, ARTIFICIAL SEQUENCE
  Engineered albumin binding polypeptide
LAEAKEAANAELDCYGKSDFYKRLIEKAKTVEGVEALKEAILAACP

SEQ ID NO: 1703 - protein, 46 aa, ARTIFICIAL SEQUENCE
  Engineered albumin binding polypeptide
LAEAKEAANAELDCYGCSDFYKRLIEKAKTVEGVEALKEAILAACP

SEQ ID NO: 1704 - protein, 46 aa, ARTIFICIAL SEQUENCE
  Engineered albumin binding polypeptide
LAEAKEAANAELDCYGKSDFYKRLIEKAKTVEGVEALKEAILAAKP

SEQ ID NO: 1705 - protein, 46 aa, ARTIFICIAL SEQUENCE
  Engineered albumin binding polypeptide
LAEAKEAANRELDCYGCSDFYKRLIEKAKTVEGVEALKEAILAAKP

SEQ ID NO: 1706 - protein, 46 aa, ARTIFICIAL SEQUENCE
  Engineered albumin binding polypeptide
LAEAKEAANRELDCYGKSDFYKRLIEKAKTVEGVEALKEAILAACP

SEQ ID NO: 1707 - protein, 46 aa, ARTIFICIAL SEQUENCE
  Engineered albumin binding polypeptide
LAEAKEAANRELDCYGCSDFYKRLIEKAKTVEGVEALKEAILAACP

SEQ ID NO: 1708 - protein, 46 aa, ARTIFICIAL SEQUENCE
  Engineered albumin binding polypeptide
LAEAKEAANRELDCYGKSDFYKRLIEKAKTVEGVEALKEAILAAKP

SEQ ID NO: 1709 - protein, 46 aa, ARTIFICIAL SEQUENCE
  Engineered albumin binding polypeptide
LAEAKEAANAELDCYGCSDFYKRLIDKAKTVEGVEALKDAILKAKP

SEQ ID NO: 1710 - protein, 46 aa, ARTIFICIAL SEQUENCE
  Engineered albumin binding polypeptide
LAEAKEAANAELDCYGKSDFYKRLIDKAKTVEGVEALKDAILKACP

SEQ ID NO: 1711 - protein, 46 aa, ARTIFICIAL SEQUENCE
  Engineered albumin binding polypeptide
LAEAKEAANAELDCYGCSDFYKRLIDKAKTVEGVEALKDAILKACP

SEQ ID NO: 1712 - protein, 46 aa, ARTIFICIAL SEQUENCE
  Engineered albumin binding polypeptide
LAEAKEAANAELDCYGKSDFYKRLIDKAKTVEGVEALKDAILKAKP

SEQ ID NO: 1713 - protein, 46 aa, ARTIFICIAL SEQUENCE
  Engineered albumin binding polypeptide
LAEAKEAANAELDCYGCSDFYKRLIDKAKTVEGVEALKDAILASKP

SEQ ID NO: 1714 - protein, 46 aa, ARTIFICIAL SEQUENCE
  Engineered albumin binding polypeptide
LAEAKEAANAELDCYGKSDFYKRLIDKAKTVEGVEALKDAILASCP

SEQ ID NO: 1715 - protein, 46 aa, ARTIFICIAL SEQUENCE
  Engineered albumin binding polypeptide
LAEAKEAANAELDCYGCSDFYKRLIDKAKTVEGVEALKDAILASCP

SEQ ID NO: 1716 - protein, 46 aa, ARTIFICIAL SEQUENCE
  Engineered albumin binding polypeptide
LAEAKEAANAELDCYGKSDFYKRLIDKAKTVEGVEALKDAILASKP

SEQ ID NO: 1717 - protein, 45 aa, ARTIFICIAL SEQUENCE
  Engineered albumin binding polypeptide
LAEAKEAANAELDSYGCSDFYKRLIDKAKTVEGVEALKDAILAAK

SEQ ID NO: 1718 - protein, 45 aa, ARTIFICIAL SEQUENCE
  Engineered albumin binding polypeptide
LAEAKEAANAELDSYGKSDFYKRLIDKAKTVEGVEALKDAILAAC

SEQ ID NO: 1719 - protein, 45 aa, ARTIFICIAL SEQUENCE
  Engineered albumin binding polypeptide
LAEAKEAANAELDSYGCSDFYKRLIDKAKTVEGVEALKDAILAAC

SEQ ID NO: 1720 - protein, 45 aa, ARTIFICIAL SEQUENCE
  Engineered albumin binding polypeptide
LAEAKEAANAELDSYGKSDFYKRLIDKAKTVEGVEALKDAILAAK

SEQ ID NO: 1721 - protein, 45 aa, ARTIFICIAL SEQUENCE
  Engineered albumin binding polypeptide
LAEAKEAANAELDAYGCSDFYKRLIDKAKTVEGVEALKDAILAAK

SEQ ID NO: 1722 - protein, 45 aa, ARTIFICIAL SEQUENCE
  Engineered albumin binding polypeptide
LAEAKEAANAELDAYGKSDFYKRLIDKAKTVEGVEALKDAILAAC

SEQ ID NO: 1723 - protein, 45 aa, ARTIFICIAL SEQUENCE
  Engineered albumin binding polypeptide
LAEAKEAANAELDAYGCSDFYKRLIDKAKTVEGVEALKDAILAAC

SEQ ID NO: 1724 - protein, 45 aa, ARTIFICIAL SEQUENCE
  Engineered albumin binding polypeptide
LAEAKEAANAELDAYGKSDFYKRLIDKAKTVEGVEALKDAILAAK

SEQ ID NO: 1725 - protein, 45 aa, ARTIFICIAL SEQUENCE
  Engineered albumin binding polypeptide
LAQAKEAANAELDAYGCSDFYKRLIDKAKTVEGVEALKDAILAAK

SEQ ID NO: 1726 - protein, 45 aa, ARTIFICIAL SEQUENCE
  Engineered albumin binding polypeptide
LAQAKEAANAELDAYGKSDFYKRLIDKAKTVEGVEALKDAILAAC

SEQ ID NO: 1727 - protein, 45 aa, ARTIFICIAL SEQUENCE
  Engineered albumin binding polypeptide
LAQAKEAANAELDAYGCSDFYKRLIDKAKTVEGVEALKDAILAAC

SEQ ID NO: 1728 - protein, 45 aa, ARTIFICIAL SEQUENCE
  Engineered albumin binding polypeptide
LAQAKEAANAELDAYGKSDFYKRLIDKAKTVEGVEALKDAILAAK

SEQ ID NO: 1729 - protein, 45 aa, ARTIFICIAL SEQUENCE
  Engineered albumin binding polypeptide
LAQAKEAANAELDSYGCSDFYKRLIDKAKTVEGVEALKDAILAAK

SEQ ID NO: 1730 - protein, 45 aa, ARTIFICIAL SEQUENCE
  Engineered albumin binding polypeptide
LAQAKEAANAELDSYGKSDFYKRLIDKAKTVEGVEALKDAILAAC

SEQ ID NO: 1731 - protein, 45 aa, ARTIFICIAL SEQUENCE
  Engineered albumin binding polypeptide
LAQAKEAANAELDSYGCSDFYKRLIDKAKTVEGVEALKDAILAAC

SEQ ID NO: 1732 - protein, 45 aa, ARTIFICIAL SEQUENCE
  Engineered albumin binding polypeptide
LAQAKEAANAELDSYGKSDFYKRLIDKAKTVEGVEALKDAILAAK

SEQ ID NO: 1733 - protein, 45 aa, ARTIFICIAL SEQUENCE
  Engineered albumin binding polypeptide
LAEAKEAANAELDCYGCSDFYKRLIDKAKTVEGVEALKDAILAAK

SEQ ID NO: 1734 - protein, 45 aa, ARTIFICIAL SEQUENCE
  Engineered albumin binding polypeptide
LAEAKEAANAELDCYGKSDFYKRLIDKAKTVEGVEALKDAILAAC

SEQ ID NO: 1735 - protein, 45 aa, ARTIFICIAL SEQUENCE
  Engineered albumin binding polypeptide
LAEAKEAANAELDCYGCSDFYKRLIDKAKTVEGVEALKDAILAAC

SEQ ID NO: 1736 - protein, 45 aa, ARTIFICIAL SEQUENCE
  Engineered albumin binding polypeptide
LAEAKEAANAELDCYGKSDFYKRLIDKAKTVEGVEALKDAILAAK

SEQ ID NO: 1737 - protein, 46 aa, ARTIFICIAL SEQUENCE
  Engineered albumin binding polypeptide
LAEAKEAANAELDSYGCSDFYKKLIDKAKTVEGVEALKDAILAAKP

SEQ ID NO: 1738 - protein, 46 aa, ARTIFICIAL SEQUENCE
  Engineered albumin binding polypeptide
LAEAKEAANAELDSYGKSDFYKKLIDKAKTVEGVEALKDAILAACP

SEQ ID NO: 1739 - protein, 46 aa, ARTIFICIAL SEQUENCE
  Engineered albumin binding polypeptide
LAEAKEAANAELDSYGCSDFYKKLIDKAKTVEGVEALKDAILAACP

SEQ ID NO: 1740 - protein, 46 aa, ARTIFICIAL SEQUENCE
  Engineered albumin binding polypeptide
LAEAKEAANAELDSYGKSDFYKKLIDKAKTVEGVEALKDAILAAKP

SEQ ID NO: 1741 - protein, 46 aa, ARTIFICIAL SEQUENCE
  Engineered albumin binding polypeptide
LAEAKEAANAELDSYGCSDFYKKLIDKAKTVEGVEALKDEILAAKP

SEQ ID NO: 1742 - protein, 46 aa, ARTIFICIAL SEQUENCE
  Engineered albumin binding polypeptide
LAEAKEAANAELDSYGKSDFYKKLIDKAKTVEGVEALKDEILAACP

SEQ ID NO: 1743 - protein, 46 aa, ARTIFICIAL SEQUENCE
  Engineered albumin binding polypeptide
LAEAKEAANAELDSYGCSDFYKKLIDKAKTVEGVEALKDEILAACP

SEQ ID NO: 1744 - protein, 46 aa, ARTIFICIAL SEQUENCE
  Engineered albumin binding polypeptide
LAEAKEAANAELDSYGKSDFYKKLIDKAKTVEGVEALKDEILAAKP

SEQ ID NO: 1745 - protein, 46 aa, ARTIFICIAL SEQUENCE
  Engineered albumin binding polypeptide
LAEAKEAANAELDSYGCSDFYKKLIDKAKTVEGVEALKEAILAAKP

SEQ ID NO: 1746 - protein, 46 aa, ARTIFICIAL SEQUENCE
  Engineered albumin binding polypeptide
LAEAKEAANAELDSYGKSDFYKKLIDKAKTVEGVEALKEAILAACP

SEQ ID NO: 1747 - protein, 46 aa, ARTIFICIAL SEQUENCE
  Engineered albumin binding polypeptide
LAEAKEAANAELDSYGCSDFYKKLIDKAKTVEGVEALKEAILAACP

SEQ ID NO: 1748 - protein, 46 aa, ARTIFICIAL SEQUENCE
  Engineered albumin binding polypeptide
LAEAKEAANAELDSYGKSDFYKKLIDKAKTVEGVEALKEAILAAKP

SEQ ID NO: 1749 - protein, 46 aa, ARTIFICIAL SEQUENCE
  Engineered albumin binding polypeptide
LAEAKEAANAELDSYGCSDFYKKLIDKAKTVEGVEALKEEILAAKP

SEQ ID NO: 1750 - protein, 46 aa, ARTIFICIAL SEQUENCE
  Engineered albumin binding polypeptide
LAEAKEAANAELDSYGKSDFYKKLIDKAKTVEGVEALKEEILAACP

SEQ ID NO: 1751 - protein, 46 aa, ARTIFICIAL SEQUENCE
  Engineered albumin binding polypeptide
LAEAKEAANAELDSYGCSDFYKKLIDKAKTVEGVEALKEEILAACP

SEQ ID NO: 1752 - protein, 46 aa, ARTIFICIAL SEQUENCE
  Engineered albumin binding polypeptide
LAEAKEAANAELDSYGKSDFYKKLIDKAKTVEGVEALKEEILAAKP

SEQ ID NO: 1753 - protein, 46 aa, ARTIFICIAL SEQUENCE
  Engineered albumin binding polypeptide
LAEAKEAANAELDSYGCSDFYKKLIEKAKTVEGVEALKDAILAAKP

SEQ ID NO: 1754 - protein, 46 aa, ARTIFICIAL SEQUENCE
  Engineered albumin binding polypeptide
LAEAKEAANAELDSYGKSDFYKKLIEKAKTVEGVEALKDAILAACP

SEQ ID NO: 1755 - protein, 46 aa, ARTIFICIAL SEQUENCE
  Engineered albumin binding polypeptide
LAEAKEAANAELDSYGCSDFYKKLIEKAKTVEGVEALKDAILAACP

SEQ ID NO: 1756 - protein, 46 aa, ARTIFICIAL SEQUENCE
  Engineered albumin binding polypeptide
LAEAKEAANAELDSYGKSDFYKKLIEKAKTVEGVEALKDAILAAKP

SEQ ID NO: 1757 - protein, 46 aa, ARTIFICIAL SEQUENCE
  Engineered albumin binding polypeptide
LAEAKEAANAELDSYGCSDFYKKLIEKAKTVEGVEALKDEILAAKP

SEQ ID NO: 1758 - protein, 46 aa, ARTIFICIAL SEQUENCE
  Engineered albumin binding polypeptide
LAEAKEAANAELDSYGKSDFYKKLIEKAKTVEGVEALKDEILAACP

SEQ ID NO: 1759 - protein, 46 aa, ARTIFICIAL SEQUENCE
  Engineered albumin binding polypeptide
LAEAKEAANAELDSYGCSDFYKKLIEKAKTVEGVEALKDEILAACP

SEQ ID NO: 1760 - protein, 46 aa, ARTIFICIAL SEQUENCE
  Engineered albumin binding polypeptide
LAEAKEAANAELDSYGKSDFYKKLIEKAKTVEGVEALKDEILAAKP

SEQ ID NO: 1761 - protein, 46 aa, ARTIFICIAL SEQUENCE
  Engineered albumin binding polypeptide
LAEAKEAANAELDSYGCSDFYKKLIEKAKTVEGVEALKEAILAAKP

SEQ ID NO: 1762 - protein, 46 aa, ARTIFICIAL SEQUENCE
  Engineered albumin binding polypeptide
LAEAKEAANAELDSYGKSDFYKKLIEKAKTVEGVEALKEAILAACP

SEQ ID NO: 1763 - protein, 46 aa, ARTIFICIAL SEQUENCE
  Engineered albumin binding polypeptide
LAEAKEAANAELDSYGCSDFYKKLIEKAKTVEGVEALKEAILAACP

SEQ ID NO: 1764 - protein, 46 aa, ARTIFICIAL SEQUENCE
  Engineered albumin binding polypeptide
LAEAKEAANAELDSYGKSDFYKKLIEKAKTVEGVEALKEAILAAKP

SEQ ID NO: 1765 - protein, 46 aa, ARTIFICIAL SEQUENCE
  Engineered albumin binding polypeptide
LAEAKEAANAELDSYGCSDFYKKLIEKAKTVEGVEALKEEILAAKP

SEQ ID NO: 1766 - protein, 46 aa, ARTIFICIAL SEQUENCE
  Engineered albumin binding polypeptide
LAEAKEAANAELDSYGKSDFYKKLIEKAKTVEGVEALKEEILAACP

SEQ ID NO: 1767 - protein, 46 aa, ARTIFICIAL SEQUENCE
  Engineered albumin binding polypeptide
LAEAKEAANAELDSYGCSDFYKKLIEKAKTVEGVEALKEEILAACP

SEQ ID NO: 1768 - protein, 46 aa, ARTIFICIAL SEQUENCE
  Engineered albumin binding polypeptide
LAEAKEAANAELDSYGKSDFYKKLIEKAKTVEGVEALKEEILAAKP

SEQ ID NO: 1769 - protein, 46 aa, ARTIFICIAL SEQUENCE
  Engineered albumin binding polypeptide
LAEAKEAANAELDSYGVSDFYKRLIDKCKTVEGVEALKDAILAALP

SEQ ID NO: 1770 - protein, 46 aa, ARTIFICIAL SEQUENCE
  Engineered albumin binding polypeptide
CAEAKEAANAELDSYGVSDFYKRLIDKAKTVEGVEALKDAILAALP

SEQ ID NO: 1771 - protein, 46 aa, ARTIFICIAL SEQUENCE
  Engineered albumin binding polypeptide
LAEAKEAANAELDSYGCSDFYKRLIDKCKTVEGVEALKDAILAAKP

SEQ ID NO: 1772 - protein, 46 aa, ARTIFICIAL SEQUENCE
  Engineered albumin binding polypeptide
CAEAKEAANAELDSYGCSDFYKRLIDKAKTVEGVEALKDAILAAKP

SEQ ID NO: 1773 - protein, 49 aa, ARTIFICIAL SEQUENCE
  Engineered albumin binding polypeptide
GSSLAEAKEAANAELDSYGCSDFYKRLIDKAKTVEGVEALKDAILAACP

SEQ ID NO: 1774 - protein, 46 aa, ARTIFICIAL SEQUENCE
  Engineered albumin binding polypeptide
LAEAKEAANAELDSYGVSDFYKRLIDKAKTVEGVEALKDAILAALP

SEQ ID NO: 1775 - protein, 48 aa, ARTIFICIAL SEQUENCE
  Engineered library/scaffold polypeptide
  misc_feature (2)..(4): Xaa can be any naturally occurring amino acid
  misc_feature (6)..(7): Xaa can be any naturally occurring amino acid
  misc_feature (10)..(11): Xaa can be any naturally occurring amino acid
  misc_feature (17)..(18): Xaa can be any naturally occurring amino acid
  misc_feature (20)..(21): Xaa can be any naturally occurring amino acid
  misc_feature (25)..(25): Xaa can be any naturally occurring amino acid
  misc_feature (28)..(28): Xaa can be any naturally occurring amino acid
EXXXAXXEIXXLPNLTXXQXXAFIXKLXDDPSQSSELLSEAKKLNDSQ

SEQ ID NO: 1776 - protein, 58 aa, ARTIFICIAL SEQUENCE
  Engineered library/scaffold polypeptide
  misc_feature (9)..(11): Xaa can be any naturally occurring amino acid
  misc_feature (13)..(14): Xaa can be any naturally occurring amino acid
  misc_feature (17)..(18): Xaa can be any naturally occurring amino acid
  misc_feature (24)..(25): Xaa can be any naturally occurring amino acid
  misc_feature (27)..(28): Xaa can be any naturally occurring amino acid
  misc_feature (32)..(32): Xaa can be any naturally occurring amino acid
  misc_feature (35)..(35): Xaa can be any naturally occurring amino acid
VDNKFNKEXXXAXXEIXXLPNLNXXQXXAFIXSLXDDPSQSANLLAEAKKLNDAQAPK

SEQ ID NO: 1777 - protein, 48 aa, ARTIFICIAL SEQUENCE
  Engineered library/scaffold polypeptide
  misc_feature (2)..(4): Xaa can be any naturally occurring amino acid
  misc_feature (6)..(7): Xaa can be any naturally occurring amino acid
  misc_feature (10)..(11): Xaa can be any naturally occurring amino acid
  misc_feature (17)..(18): Xaa can be any naturally occurring amino acid
  misc_feature (20)..(21): Xaa can be any naturally occurring amino acid
  misc_feature (25)..(25): Xaa can be any naturally occurring amino acid
  misc_feature (28)..(28): Xaa can be any naturally occurring amino acid
EXXXAXXEIXXLPNLTXXQXXAFIXKLXDDPSQSSELLSEAKKLSESQ

SEQ ID NO: 1778 - protein, 48 aa, ARTIFICIAL SEQUENCE
  Engineered library/scaffold polypeptide
  misc_feature (2)..(4): Xaa can be any naturally occurring amino acid
  misc_feature (6)..(7): Xaa can be any naturally occurring amino acid
  misc_feature (10)..(11): Xaa can be any naturally occurring amino acid
  misc_feature (17)..(18): Xaa can be any naturally occurring amino acid
  misc_feature (20)..(21): Xaa can be any naturally occurring amino acid
  misc_feature (25)..(25): Xaa can be any naturally occurring amino acid
  misc_feature (28)..(28): Xaa can be any naturally occurring amino acid
EXXXAXXEIXXLPNLTXXQXXAFIXKLXDDPSQSSELLSEAKKLESSQ

SEQ ID NO: 1779 - protein, 48 aa, ARTIFICIAL SEQUENCE
  Engineered library/scaffold polypeptide
  misc_feature (2)..(4): Xaa can be any naturally occurring amino acid
  misc_feature (6)..(7): Xaa can be any naturally occurring amino acid
  misc_feature (10)..(11): Xaa can be any naturally occurring amino acid
  misc_feature (17)..(18): Xaa can be any naturally occurring amino acid
  misc_feature (20)..(21): Xaa can be any naturally occurring amino acid
  misc_feature (25)..(25): Xaa can be any naturally occurring amino acid
  misc_feature (28)..(28): Xaa can be any naturally occurring amino acid
EXXXAXXEIXXLPNLTXXQXXAFIXKLXRQPEQSSELLSEAKKLNDSQ

SEQ ID NO: 1780 - protein, 48 aa, ARTIFICIAL SEQUENCE
  Engineered library/scaffold polypeptide
  misc_feature (2)..(4): Xaa can be any naturally occurring amino acid
  misc_feature (6)..(7): Xaa can be any naturally occurring amino acid
  misc_feature (10)..(11): Xaa can be any naturally occurring amino acid
  misc_feature (17)..(18): Xaa can be any naturally occurring amino acid
  misc_feature (20)..(21): Xaa can be any naturally occurring amino acid
  misc_feature (25)..(25): Xaa can be any naturally occurring amino acid
  misc_feature (28)..(28): Xaa can be any naturally occurring amino acid
EXXXAXXEIXXLPNLTXXQXXAFIXKLXRQPEQSSELLSEAKKLSESQ

SEQ ID NO: 1781 - protein, 48 aa, ARTIFICIAL SEQUENCE
  Engineered library/scaffold polypeptide
  misc_feature (2)..(4): Xaa can be any naturally occurring amino acid
  misc_feature (6)..(7): Xaa can be any naturally occurring amino acid
  misc_feature (10)..(11): Xaa can be any naturally occurring amino acid
  misc_feature (17)..(18): Xaa can be any naturally occurring amino acid
  misc_feature (20)..(21): Xaa can be any naturally occurring amino acid
  misc_feature (25)..(25): Xaa can be any naturally occurring amino acid
  misc_feature (28)..(28): Xaa can be any naturally occurring amino acid
EXXXAXXEIXXLPNLTXXQXXAFIXKLXRQPEQSSELLSEAKKLESSQ

SEQ ID NO: 1782 - protein, 30 aa, Artificial Sequence
  Albumin binding polypeptide
  MISC_FEATURE (2)..(2): Xaa is selected from C and K
  MISC_FEATURE (5)..(5): Xaa is selected from F and Y
  MISC_FEATURE (8)..(8): Xaa is selected from D, K, N, R, and S
  MISC_FEATURE (9)..(9): Xaa is selected from F, I, L, M, V, and Y
  MISC_FEATURE (11)..(11): Xaa is selected from D, E, N, and S
  MISC_FEATURE (12)..(12): Xaa is selected from K, N, and R
  MISC_FEATURE (14)..(14): Xaa is selected from K and R
  MISC_FEATURE (20)..(20): Xaa is selected from D, E, H, K, N, Q, R, and S
  MISC_FEATURE (23)..(23): Xaa is selected from I, K, and T
  MISC_FEATURE (24)..(24): Xaa is selected from A, D, E, G, H, L, S, and T
  MISC_FEATURE (25)..(25): Xaa is selected from A, D, E, and H
  MISC_FEATURE (28)..(28): Xaa is selected from A and K
  MISC_FEATURE (29)..(29): Xaa is selected from A, E, and S
  MISC_FEATURE (30)..(30): Xaa is selected from C and K
GXSDXYKXXIXXAXTVEGVXALXXXILXXX

SEQ ID NO: 1783 - protein, 15 aa, Artificial Sequence
  Albumin binding polypeptide
  MISC_FEATURE (3)..(3): Xaa is selected from C, E, Q, and S
  MISC_FEATURE (6)..(6): Xaa is selected from C, E, S, and V
  MISC_FEATURE (7)..(7): Xaa is selected from A, D, E, L, and S
  MISC_FEATURE (9)..(9): Xaa is selected from I, N, and L
  MISC_FEATURE (10)..(10): Xaa is selected from A, K, R, and S
  MISC_FEATURE (13)..(13): Xaa is selected from D and K
  MISC_FEATURE (14)..(14): Xaa is selected from A, C, K, and S
  MISC_FEATURE (15)..(15): albumin binding motif
LAXAKXXAXXELXXY

1. An albumin binding polypeptide comprising an albumin binding motif [ABM], which motif consists of the amino acid sequence
(SEQ ID NO: 1782)
GX_{A}SDX₅YKX₈X₉I X₁₁X₁₂AX₁₄TVEGVX₂₀ ALX₂₃X₂₄X₂₅ILX₂₈X₂₉X_{B}
wherein, independently from each other,
X_{A} is selected from C and K;
X_{B} is selected from C and K;
and
X₅ is selected from F and Y;
X₈ is selected from D, K, N, R and S;
X₉ is selected from F, I, L, M, V and Y;
Xᵢᵢ is selected from D, E, N and S;
X₁₂ is selected from K, N and R;
X₁₄ is selected from K and R;
X₂₀ is selected from D, E, H, K, N, Q, R and S;
X₂₃ is selected from I, K and T;
X₂₄ is selected from A, D, E, G, H, L, S and T;
X₂₅ is selected from A, D, E and H;
X₂₈ is selected from A and K; and
X₂₉ is selected from A, E and S.

2. The albumin binding polypeptide according to claim 1, wherein X_{A}X_{B} is CK.

3. The albumin binding polypeptide according to claim 1, wherein X_{A}X_{B} is CC.

4. The albumin binding polypeptide according to claim 1, wherein said albumin binding motif [ABM] comprises an additional position X₃₁ located on the C-terminal side of the ABM.

5. The albumin binding polypeptide according to claim 4, wherein X₃₁ is P.

6. The albumin binding polypeptide according to claim 1, in which the [ABM] consists of an amino acid sequence extending from position 16 to position 45 in an amino acid sequence selected from the group consisting of SEQ ID NO:1-1768.

7. The albumin binding polypeptide according to claim 1, in which said albumin binding motif forms part of a three-helix bundle protein domain.

8. The albumin binding polypeptide according to claim 7, in which said three-helix bundle protein domain is selected from the group consisting of domain GA1, domain GA2 and domain GA3 of protein G from Streptococcus strain G148, in particular domain GA3 of protein G from Streptococcus strain G148.

9. The albumin binding polypeptide according to claim 7, which comprises the amino acid sequence:
LAXₐAKX_{b}X_{c}AX_{d}XₑELX_{f}X_{g}Y-[ABM] (SEQ ID NO: 1783)
wherein
[ABM] is an albumin binding motif as defined in claim 1, and, independently of each other,
Xₐ is selected from C, E, Q and S;
X_{b} is selected from C, E, S and V;
X_{c} is selected from A, D, E, L and S;
X_{d} is selected from I, N and L;
Xₑ is selected from A, K, R and S;
X_{f} is selected from D and K; and
X_{g} is selected from A, C, K and S.

10. The albumin binding polypeptide according to claim 1, which comprises an amino acid sequence selected from SEQ ID NO:1-1768.

11. The albumin binding polypeptide according to claim 1, wherein said K in position X_{A} or X_{B}, when present, is functionalized.

12. The albumin binding polypeptide according to claim 1, wherein said amino acid sequence is crosslinked.

13. The albumin binding polypeptide according to claim 12, wherein said crosslink extends between the amino acid residue in position X_{A} and the amino acid residue in position X_{B}.

14. The albumin binding polypeptide according to claim 12, wherein said polypeptide is resistant to proteolytic cleavage by at least one protease of the gastrointestinal tract.

15. The albumin binding polypeptide according to claim 1, which binds to albumin such that the K_{D} value of the interaction is at most 1×10⁻⁸ M, such as at most 1×10⁻⁹ M, such as at most 1×10⁻¹° M, such as at most 1×10⁻¹¹ M, such as at most 1×10⁻¹² M.

16. The albumin binding polypeptide according to claim 1, wherein said albumin is human serum albumin.

17. A compound comprising:
at least one moiety (I) which is an albumin binding polypeptide according to claim 1;
one moiety (II) which confers a desired therapeutic activity; and
optionally, at least one further moiety (III) which confers a desired therapeutic activity, which activity may be the same or different from said activity of moiety (II).

18. A pharmaceutical composition, comprising a compound according to claim 17 and at least one pharmaceutically acceptable excipient.

19. The pharmaceutical composition according to claim 18, which further comprises at least one component for increasing oral bioavailability of said therapeutic activity.

20.-21. (canceled)

22. A method of treatment of a mammalian subject in need of such treatment, comprising administration of a therapeutically effective amount of an albumin binding polypeptide according to claim 1.

23. The method according to claim 22, wherein said administration is oral administration.

24. A method of treatment of a mammalian subject in need of such treatment, comprising administration of a compound according to claim 17.

25. The method according to claim 24, wherein said administration is oral administration.

26. A method of treatment of a mammalian subject in need of such treatment, comprising administration of a pharmaceutical composition according to claim 18.

27. The method according to claim 26, wherein said administration is oral administration.
